(19) United States
(12) Patent Application Publication
(10) Pub. No.: US 2016/0369295 A1
(43) Pub. Date: Dec. 22, 2016

(54) DROUGHT TOLERANT PLANTS AND RELATED CONSTRUCTS AND METHODS INVOLVING GENES ENCODING DTP4 POLYPEPTIDES

(71) Applicants: E.I. DU PONT DE NEMOURS AND COMPANY, Wilmington, DE (US); PIONEER HI-BRED INTERNATIONAL INC, Johnston, IA (US)

(72) Inventors: Stephen M. Allen, Wilmington, DE (US); Bindu Andreuzza, Pradesh (IN); Norbert Brugiere, Johnston, IA (US); Zhenglin Hou, Ankeny, IA (US); Ratna Kumria, Hyderabad (IN); H. Renee Lafitte, Davis, CA (US); Xiao-Yi Li, Wilmington, DE (US); Cheng Lu, Newark, DE (US); Stanley Luck, Wilmington, DE (US); Amitabh Mohanty, Hyderabad (IN); Jeffery Mullen, Minnetrista, MN (US); Rupa Raja, Secunderabad (IN); Hajime Sakai, Newark, DE (US); Scott V. Tingey, Rockdale, TX (US); Robert W. Williams, Hockessin, DE (US)

(73) Assignees: Pioneer Hi-Bred International Inc., Johnston, IA (US); E. I. du Pont de Nemours and Company, Wilmington, DE (US)

(21) Appl. No.: 15/107,126

(22) PCT Filed: Dec. 22, 2014
(86) PCT No.: PCT/US14/71897

§ 371 Date: Jun. 22, 2016

Related U.S. Application Data
(60) Provisional application No. 61/921,754, filed on Dec. 30, 2013.

(51) Int. Cl. C12N 15/82; C12N 9/18

(52) U.S. Cl. CPC C12N 15/8273; C12N 9/18; C12Y 301/01001; C12N 15/8271; C12N 15/8261

(57) ABSTRACT

Isolated polynucleotides and polypeptides and recombinant DNA constructs useful for conferring stress tolerance are presented herein, along with compositions (such as plants or seeds) comprising these recombinant DNA constructs, and methods utilizing these recombinant DNA constructs. The recombinant DNA construct comprises a polynucleotide operably linked to a promoter that is functional in a plant, wherein said polynucleotide encodes a DTP4 polypeptide.

### CROSS REFERENCE TO RELATED APPLICATIONS

[0001] This application claims the benefit of U.S. Provisional Application No. 61/921,754, filed Dec. 30, 2013, the entire content of which is herein incorporated by reference.

### REFERENCE TO SEQUENCE LISTING SUBMITTED ELECTRONICALLY

[0002] The official copy of the sequence listing is submitted electronically via EFS-Web as an ASCII formatted sequence listing with a file named 20141218_BB1672PCT_SequenceListing created on Dec. 18, 2014 and having a size of 1,461 kilobytes and is filed concurrently with the specification. The sequence listing contained in this ASCII formatted document is part of the specification and is herein incorporated by reference in its entirety.

### FIELD

[0003] The field relates to plant breeding and genetics and, in particular, relates to recombinant DNA constructs useful in plants for conferring tolerance to drought.

### BACKGROUND

[0004] Abiotic stress is the primary cause of crop loss worldwide, causing average yield losses of more than 50% for major crops (Boyer, J. S. (1982) Science 218:443-448; Bray, E. A. et al. (2000) In Biochemistry and Molecular Biology of Plants, Edited by Buchannan, B. B. et al., Amer. Soc. Plant Biol., pp. 1158-1203). Among the various abiotic stresses, drought is the major factor that limits crop productivity worldwide. Exposure of plants to a water-limiting environment during various developmental stages appears to activate various physiological and developmental changes. Understanding of the basic biochemical and molecular mechanism for drought stress perception, transduction and tolerance is a major challenge in biology. Reviews on the molecular mechanisms of abiotic stress responses and the genetic regulatory networks of drought stress tolerance have been published (Valliyodan, B., and Nguyen, H. T., (2006) Curr. Opin. Plant Biol. 9:189-195; Wang, W., et al. (2003) Planta 218:1-14); Vinocur, B., and Altman, A. (2005) Curr. Opin. Biotechnol. 16:123-132; Chaves, M. M., and Oliveira, M. M. (2004) J. Exp. Bot. 55:2365-2384; Shinozaki, K., et al. (2003) Curr. Opin. Plant Biol. 6:410-417; Yamaguchi-Shinozaki, K., and Shinozaki, K. (2005) Trends Plant Sci. 10:88-94).

[0005] Another abiotic stress that can limit crop yields is low nitrogen stress. The adsorption of nitrogen by plants plays an important role in their growth (Gallais et al., J. Exp. Bot. 55(396):295-306 (2004)). Plants synthesize amino acids from inorganic nitrogen in the environment. Consequently, nitrogen fertilization has been a powerful tool for increasing the yield of cultivated plants, such as maize and soybean. If the nitrogen assimilation capacity of a plant can be increased, then increases in plant growth and yield increase are also expected. In summary, plant varieties that have better nitrogen use efficiency (NUE) are desirable.

### SUMMARY

[0006] The present disclosure includes:

[0007] One embodiment of the current disclosure is a plant comprising in its genome a recombinant DNA construct comprising a polynucleotide operably linked to at least one heterologous regulatory element, wherein said polynucleotide encodes a polypeptide having an amino acid sequence of at least 80% sequence identity, when compared to SEQ ID NO:18, 39, 43, 45, 47, 49, 51, 55, 59, 61,64, 65, 66, 95, 97, 101, 103, 107, 111, 113, 117, 119, 121, 123, 127, 129, 130, 131, 132, 135, 627 or 628, and wherein said plant exhibits at least one phenotype selected from the group consisting of: increased triple stress tolerance, increased drought stress tolerance, increased nitrogen stress tolerance, increased osmotic stress tolerance, altered ABA response, altered root architecture, increased tiller number, when compared to a control plant not comprising said recombinant DNA construct. In one embodiment said plant exhibits an increase in yield, biomass, or both, when compared to a control plant not comprising said recombinant DNA construct. In one embodiment, said plant exhibits said increase in yield, biomass, or both when compared, under water limiting conditions, to said control plant not comprising said recombinant DNA construct.

[0008] One embodiment of the current disclosure also includes seed of the plants disclosed herein, wherein said seed comprises in its genome a recombinant DNA construct comprising a polynucleotide operably linked to at least one heterologous regulatory element, wherein said polynucleotide encodes a polypeptide having an amino acid sequence of at least 80% sequence identity, when compared to SEQ ID NO:18, 39, 43, 45, 47, 49, 51,55, 59, 61,64, 65, 66, 95, 97, 101, 103, 107, 111, 113, 117, 119, 121,123, 127, 129, 130, 131,132, 135, 627 or 628, and wherein a plant produced from said seed exhibits an increase in at least one phenotype selected from the group consisting of: drought stress tolerance, triple stress tolerance, osmotic stress tolerance, nitrogen stress tolerance, tiller number, yield and biomass, when compared to a control plant not comprising said recombinant DNA construct.

[0009] One embodiment of the current disclosure is a method of increasing stress tolerance in a plant, wherein the stress is selected from a group consisting of: drought stress, triple stress, nitrogen stress and osmotic stress, the method comprising: (a) introducing into a regenerable plant cell a recombinant DNA construct comprising a polynucleotide operably linked to at least one heterologous regulatory sequence, wherein the polynucleotide encodes a polypeptide having an amino acid sequence of at least 80% sequence identity, when compared to SEQ ID NO:18, 39, 43, 45, 47, 49, 51,55, 59, 61,64, 65, 66, 95, 97, 101, 103, 107, 111, 113, 117, 119, 121, 123, 127, 129, 130, 131, 132, 135, 627 or 628; (b) regenerating a transgenic plant from the regenerable plant cell of (a), wherein the transgenic plant comprises in its genome the recombinant DNA construct; and (c) obtaining a progeny plant derived from the transgenic plant of (b), wherein said progeny plant comprises in its genome the recombinant DNA construct and exhibits increased tolerance to at least one stress selected from the group consisting of drought stress, triple stress, nitrogen stress and osmotic stress, when compared to a control plant not comprising the recombinant DNA construct.

[0010] The current disclosure also encompasses a method of selecting for increased stress tolerance in a plant, wherein the stress is selected from a group consisting of: drought stress, triple stress, nitrogen stress and osmotic stress, the method comprising: (a) obtaining a transgenic plant, wherein the transgenic plant comprises in its genome a recombinant DNA construct comprising a polynucleotide operably linked to at least one heterologous regulatory element, wherein said polynucleotide encodes a polypeptide having an amino acid sequence of at least 80% sequence identity, when compared to SEQ ID NO:18, 39, 43, 45, 47, 49, 51, 55, 59, 61, 64, 65, 66, 95, 97, 101, 103, 107, 111, 113, 117, 119, 121, 123, 127, 129, 130, 131, 132, 135, 627 or 628; (b) growing the transgenic plant of part (a) under conditions wherein the polynucleotide is expressed; and (c) selecting the transgenic plant of part (b) with increased stress tolerance, wherein the stress is selected from the group consisting of: drought stress, triple stress, nitrogen stress and osmotic stress, when compared to a control plant not comprising the recombinant DNA construct.

[0011] One embodiment of the current disclosure is a method of selecting for an alteration of yield, biomass, or both in a plant, comprising: (a) obtaining a transgenic plant, wherein the transgenic plant comprises in its genome a recombinant DNA construct comprising a polynucleotide operably linked to at least one regulatory element, wherein said polynucleotide encodes a polypeptide having an amino acid sequence of at least 80% sequence identity, when compared to SEQ ID NO:18, 39, 43, 45, 47, 49, 51, 55, 59, 61,64, 65, 66, 95, 97, 101, 103, 107, 111, 113, 117, 119, 121, 123, 127, 129, 130, 131, 132, 135, 627 or 628; (b) growing the transgenic plant of part (a) under conditions wherein the polynucleotide is expressed; and (c) selecting the transgenic plant of part (b) that exhibits an alteration of yield, biomass or both when compared to a control plant not comprising the recombinant DNA construct. In one embodiment, said selecting step (c) comprises determining whether the transgenic plant of (b) exhibits an alteration of yield, biomass or both when compared, under water limiting conditions, to a control plant not comprising the recombinant DNA construct. In one embodiment, said alteration is an increase.

[0012] The current disclosure also encompasses an isolated polynucleotide comprising: (a) a nucleotide sequence encoding a polypeptide with stress tolerance activity, wherein the stress is selected from a group consisting of drought stress, triple stress, nitrogen stress and osmotic stress, and wherein the polypeptide has an amino acid sequence of at least 95% sequence identity when compared to SEQ ID NO:18, 39, 43, 45, 47, 49, 51,55, 59, 61,64, 65, 66, 95, 97, 101, 103, 107, 111, 113, 117, 119, 121, 123, 127, 129, 130, 131, 132, 135, 627 or 628; or (b) the full complement of the nucleotide sequence of (a). The amino acid sequence of the polypeptide comprises SEQ ID NO:18, 39, 43, 45, 47, 49, 51, 55, 59, 61, 64, 65, 66, 95, 97, 101, 103, 107, 111, 113, 117, 119, 121, 123, 127, 129, 130, 131, 132, 135, 627 or 628. In one embodiment, the nucleotide sequence comprises SEQ ID NO:16, 17, 19, 38, 42, 44, 46, 48, 50, 54, 58, 60, 62, 63, 94, 96, 100, 102, 106, 110, 112, 116, 118, 120 or 122.

[0013] The current disclosure also encompasses a plant or seed comprising a recombinant DNA construct, wherein the recombinant DNA construct comprises any of the polynucleotides disclosed herein, wherein the polynucleotide is operably linked to at least one heterologous regulatory sequence.

[0014] In another embodiment, a plant comprising in its genome an endogenous polynucleotide operably linked to at least one heterologous regulatory element, wherein said endogenous polynucleotide encodes a polypeptide having an amino acid sequence of at least 80% sequence identity, when compared to SEQ ID NO:18, 39, 43, 45, 47, 49, 51, 55, 59, 61,64, 65, 66, 95, 97, 101, 103, 107, 111, 113, 117, 119, 121, 123, 127, 129, 130, 131, 132, 135, 627 or 628, and wherein said plant exhibits at least one phenotype selected from the group consisting of increased triple stress tolerance, increased drought stress tolerance, increased nitrogen stress tolerance, increased osmotic stress tolerance, altered ABA response, altered root architecture, increased tiller number, when compared to a control plant not comprising the heterologous regulatory element.

[0015] One embodiment is a method of increasing in a crop plant at least one phenotype selected from the group consisting of: triple stress tolerance, drought stress tolerance, nitrogen stress tolerance, osmotic stress tolerance, ABA response, tiller number, yield and biomass, the method comprising increasing the expression of a carboxylesterase in the crop plant. In one embodiment, the crop plant is maize. In one embodiment, the carboxylesterase has at least 80% sequence identity, when compared to SEQ ID NO:18, 39, 43, 45, 47, 49, 51, 55, 59, 61, 64, 65, 66, 95, 97, 101, 103, 107, 111, 113, 117, 119, 121, 123, 127, 129, 130, 131, 132, 135, 627 or 628. In one embodiment, the carboxylesterase gives an E-value score of 1E-15 or less when queried using a Profile Hidden Markov Model prepared using SEQ ID NOS:18, 29, 33, 45, 47, 53, 55, 61, 64, 65, 77, 78, 101, 103, 105, 107, 111, 115, 131, 132, 135, 137, 139, 141, 144, 433, 559 and 604, the query being carried out using the hmmsearch algorithm wherein the Z parameter is set to 1 billion.

[0016] Another embodiment is a method of making a plant that exhibits at least one phenotype selected from the group consisting of: increased triple stress tolerance, increased drought stress tolerance, increased nitrogen stress tolerance, increased osmotic stress tolerance, altered ABA response, altered root architecture, increased tiller number, increased yield and increased biomass, when compared to a control plant, the method comprising the steps of introducing into a plant a recombinant DNA construct comprising a polynucleotide operably linked to at least one heterologous regulatory element, wherein said polynucleotide encodes a polypeptide having an amino acid sequence of at least 80% sequence identity, when compared to SEQ ID NO:18, 39, 43, 45, 47, 49, 51, 55, 59, 61,64, 65, 66, 95, 97, 101, 103, 107, 111, 113, 117, 119, 121, 123, 127, 129, 130, 131, 132, 135, 627 or 628.

[0017] Another embodiment is a method of producing a plant that exhibits at least one phenotype selected from the group consisting of: increased triple stress tolerance, increased drought stress tolerance, increased nitrogen stress tolerance, increased osmotic stress tolerance, altered ABA response, altered root architecture, increased tiller number, increased yield and increased biomass, wherein the method comprises growing a plant from a seed comprising a recombinant DNA construct, wherein the recombinant DNA construct comprises a polynucleotide operably linked to at least one heterologous regulatory element, wherein the polynucleotide encodes a polypeptide having an amino acid sequence of at least 80% sequence identity, when compared to SEQ ID NO:18, 39, 43, 45, 47, 49, 51, 55, 59, 61, 64, 65, 66, 95, 97, 101, 103, 107, 111, 113, 117, 119, 121, 123, 127, 129, 130, 131, 132, 135, 627 or 628, wherein the plant exhibits at least one phenotype selected from the group consisting of: increased triple stress tolerance, increased drought stress tolerance, increased nitrogen stress tolerance, increased osmotic stress tolerance, altered ABA response, altered root architecture, increased tiller number, increased yield and increased biomass, when compared to a control plant not comprising the recombinant DNA construct.

[0018] Another embodiment is a method of producing a seed, the method comprising the following: (a) crossing a first plant with a second plant, wherein at least one of the first plant and the second plant comprises a recombinant DNA construct, wherein the recombinant DNA construct comprises a polynucleotide operably linked to at least one heterologous regulatory element, wherein the polynucleotide encodes a polypeptide having an amino acid sequence of at least 80% sequence identity, when compared to SEQ ID NO:18, 39, 43, 45, 47, 49, 51, 55, 59, 61,64, 65, 66, 95, 97, 101, 103, 107, 111, 113, 117, 119, 121, 123, 127, 129, 130, 131, 132, 135, 627 or 628; and (b) selecting a seed of the crossing of step (a), wherein the seed comprises the recombinant DNA construct. A plant grown from the seed of part (b) exhibits at least one phenotype selected from the group consisting of: increased triple stress tolerance, increased drought stress tolerance, increased nitrogen stress tolerance, increased osmotic stress tolerance, altered ABA response, altered root architecture, increased tiller number, increased yield and increased biomass, when compared to a control plant not comprising the recombinant DNA construct.

[0019] In one embodiment, a method of producing oil or a seed by-product, or both, from a seed, the method comprising extracting oil or a seed by-product, or both, from a seed that comprises a recombinant DNA construct, wherein the recombinant DNA construct comprises a polynucleotide operably linked to at least one heterologous regulatory element, wherein the polynucleotide encodes a polypeptide having an amino acid sequence of at least 80% sequence identity, when compared to SEQ ID NO:18, 39, 43, 45, 47, 49, 51,55, 59, 61, 64, 65, 66, 95, 97, 101, 103, 107, 111, 113, 117, 119, 121, 123, 127, 129, 130, 131, 132, 135, 627 or 628. In one embodiment, the seed is obtained from a plant that comprises the recombinant DNA construct and exhibits at least one phenotype selected from the group consisting of: increased triple stress tolerance, increased drought stress tolerance, increased nitrogen stress tolerance, increased osmotic stress tolerance, altered ABA response, altered root architecture, increased tiller number, increased yield and increased biomass, when compared to a control plant not comprising the recombinant DNA construct. In one embodiment, the oil or the seed by-product, or both, comprises the recombinant DNA construct.

[0020] In another embodiment, the present disclosure includes any of the methods of the present disclosure wherein the plant is selected from the group consisting of: Arabidopsis, maize, soybean, sunflower, sorghum, canola, wheat, alfalfa, cotton, rice, barley, millet, sugar cane and switchgrass.

[0021] In another embodiment, the present disclosure concerns a recombinant DNA construct comprising any of the isolated polynucleotides of the present disclosure operably linked to at least one heterologous regulatory sequence, and a cell, a microorganism, a plant, and a seed comprising the recombinant DNA construct. The cell may be eukaryotic, e.g., a yeast, insect or plant cell, or prokaryotic, e.g., a bacterial cell.

[0022] In another embodiment, a plant comprising in its genome a recombinant DNA construct comprising a polynucleotide operably linked to at least one heterologous regulatory element, wherein said polynucleotide encodes a polypeptide having an amino acid sequence of at least 95% sequence identity, when compared to SEQ ID NO:18, and wherein said plant exhibits at least one phenotype selected from the group consisting of: increased triple stress tolerance, increased drought stress tolerance, increased nitrogen stress tolerance, increased osmotic stress tolerance, altered ABA response, altered root architecture, increased tiller number, increased yield and increased biomass, when compared to a control plant not comprising said recombinant DNA construct.

[0023] In another embodiment, a method of making a plant that exhibits at least one phenotype selected from the group consisting of: increased triple stress tolerance, increased drought stress tolerance, increased nitrogen stress tolerance, increased osmotic stress tolerance, altered ABA response, altered root architecture, increased tiller number, increased yield and increased biomass, when compared to a control plant, the method comprising the steps of introducing into a plant a recombinant DNA construct comprising a polynucleotide operably linked to at least one heterologous regulatory element, wherein said polynucleotide encodes a polypeptide having an amino acid sequence of at least 95% sequence identity, when compared to SEQ ID NO:18.

### BRIEF DESCRIPTION OF THE DRAWINGS AND SEQUENCE LISTING

[0024] The disclosure can be more fully understood from the following detailed description and the accompanying drawings and Sequence Listing which form a part of this application.

[0025] FIG. 1A-FIG. 1G show the alignment of the DTP4 polypeptides which were tested in ABA sensitivity assays (SEQ ID NOS:18, 39, 43, 45, 47, 49, 51, 55, 59, 61, 64, 65, 66, 95, 97, 99, 101, 103, 107, 111, 113, 117, 119, 121,123, 127, 129, 130, 131, 132, 135, 627 and 628). Residues that are identical to the residue of consensus sequence (SEQ ID NO:630) at a given position are enclosed in a box. A consensus sequence (SEQ ID NO:630) is presented where a residue is shown if identical in all sequences, otherwise, a period is shown.

[0026] FIG. 1C shows the conserved key residues for an oxyanion hole (represented by asterisks), FIG. 1D shows the conserved nucleophile elbow, FIGS. 1D, 1F and 1G also show the catalytic triad of Ser-His-Asp in shaded boxes. These come together in the tertiary structure of the polypeptide.

[0027] FIG. 2 shows the percent sequence identity and the divergence values for each pair of amino acids sequences of DTP4 polypeptides displayed in FIG. 1A-1G.

[0028] FIG. 3 shows the treatment schedule for screening plants with enhanced drought tolerance.

[0029] FIG. 4 shows the percentage germination response of the pBC-yellow-At5g62180 transgenic and wt col-0 Arabidopsis line in an ABA-response assay, at 1 μM ABA.

[0030] FIG. 5 shows the yield analysis of maize lines transformed with pCV-DTP4 encoding the Arabidopsis lead gene At5g62180.

[0031] FIG. 6A and FIG. 6B show the % germination, % greenness and % true leaf emergence in a 10-day assay, respectively for the wt Arabidopsis plants and At5g62180 transgenic line (Line ID 64) at different quad concentrations. 0% quad is indicated as GM (Growth media).

[0032] FIG. 7 shows a graph showing % Germination for the wt and At5g62180 transgenic line, after 48 h at 60%, 65% and 70% quad concentrations.

[0033] FIG. 8 shows the schematic of the ABA-Root assay.

[0034] FIG. 9 shows an effect of different ABA concentrations on the wt and At5g62180 lines.

[0035] FIG. 10 shows the yield analysis of maize lines transformed with pCV-DTP4ac encoding the Arabidopsis lead gene At5g62180, in 1^{st} year field testing, under drought stress.

[0036] FIG. 10A shows the yield analysis in 7 different locations that are categorized according to the stress experienced in these locations.

[0037] FIG. 10B shows the yield analysis across locations, grouped by stress levels.

[0038] FIG. 11 shows the analysis of the agronomic characteristics of maize lines transformed with pCV-DTP4ac encoding the Arabidopsis lead gene At5g62180.

[0039] FIG. 11A shows the analysis of ear height (EARHT) and plant height (PLANTHT) in maize lines transformed with pCV-DTP4ac encoding the Arabidopsis lead gene At5g62180.

[0040] FIG. 11B shows the analysis of thermal time to shed (TTSHD), root lodging or stalk lodging in maize lines transformed with pCV-DTP4ac encoding the Arabidopsis lead gene At5g62180.

[0041] FIG. 12 shows the percentage germination response of the transgenic Arabidopsis plants overexpressing some of the DTP4 polypeptides disclosed herein, compared with wt col-0 Arabidopsis line in an ABA-response assay, at 1 μM ABA (FIG. 12A) and 2 μM ABA (FIG. 12B). FIG. 12 C shows the percentage germination response at 1 μM ABA for some more DTP4 polypeptides, as explained in Table 8.

[0042] FIG. 13 shows the percentage green cotyledon response of the transgenic Arabidopsis plants overexpressing some of the DTP4 polypeptides disclosed herein, compared with wt col-0 Arabidopsis line in an ABA-response assay, at 1 μM ABA, as explained in Table 9.

[0043] FIG. 14 shows the yield analysis of maize lines transformed with pCV-DTP4ac encoding the Arabidopsis lead gene At5g62180, in 2^{nd} year field testing, under drought stress.

[0044] FIG. 14A shows the yield analysis in 8 “no stress” locations.

[0045] FIG. 14B shows the yield analysis in 5 “medium stress” locations.

[0046] FIG. 14C shows the yield analysis in 5 “severe stress” locations.

[0047] FIG. 14 D shows the yield analysis across locations, grouped by drought stress levels, and the last column shows the yield analysis across all locations, regardless of stress level.

[0048] FIG. 15 shows the yield analysis of maize lines transformed with pCV-DTP4ac encoding the Arabidopsis lead gene At5g62180, under low nitrogen stress.

[0049] FIG. 16A shows the yield analysis of maize lines transformed with pCV-CXE8ac encoding the DTP4 polypeptide, AT-CXE8 (At2g45600; SEQ ID NO:64), under different drought stress locations.

[0050] FIG. 16B shows the yield analysis of maize lines transformed with pCV-CXE8ac encoding the DTP4 polypeptide, AT-CXE8 (At2g45600; SEQ ID NO:64), across locations, grouped by different drought stress levels.

[0051] FIG. 17 shows the detection of DTP4 protein in transgenic maize leaves by mass spectrometry, at growth stage V9. Values are means and standard errors of 4 field plot replications.

[0052] FIG. 18 shows the tiller number in maize plants transformed with pCV-DTP4ac encoding the Arabidopsis lead gene AT-DTP4 (At5g62180), under no stress and drought stress conditions, compared to maize plants not comprising the Arabidopsis gene.

[0053] FIG. 19 shows the root and shoot growth response to ABA in maize plants transformed with pCV-DTP4ac encoding the Arabidopsis lead gene AT-DTP4 (At5g62180), under 0 μM and 10 μM ABA. The graphs represent two different experiments done on two different days.

[0054] FIG. 20 shows the leaf area in response to triple stress in maize plants transformed with pCV-DTP4ac encoding the Arabidopsis lead gene AT-DTP4 (At5g62180). The graphs represent leaf area 0, 3 and 6 days after treatment (DAT).

[0055] FIG. 21 shows the percentage germination response to osmotic stress in maize plants transformed with pCV-DTP4ac encoding the Arabidopsis lead gene AT-DTP4 (At5g62180). The graphs represent two different experiments done on two different days.

[0056] FIG. 22 shows shoot growth response in maize plants transformed with pCV-DTP4ac encoding the Arabidopsis lead gene AT-DTP4 (At5g62180), in the tall clear tube assay.

[0057] FIG. 23 shows esterase activity of AT-DTP4 fusion protein expressed in E. coli, with p-nitrophenyl acetate as substrate.

[0058] FIG. 24 shows the phylogenetic tree showing DTP4 polypeptides.

[0059] SEQ ID NO:1 is the nucleotide sequence of the 4×35S enhancer element from the pHSbarENDs2 activation tagging vector.

[0060] SEQ ID NO:2 is the nucleotide sequence of the attP1 site.

[0061] SEQ ID NO:3 is the nucleotide sequence of the attP2 site.

[0062] SEQ ID NO:4 is the nucleotide sequence of the attL1 site.

[0063] SEQ ID NO:5 is the nucleotide sequence of the attL2 site.

[0064] SEQ ID NO:6 is the nucleotide sequence of the ubiquitin promoter with 5′ UTR and first intron from Zea mays.

[0065] SEQ ID NO:7 is the nucleotide sequence of the PinII terminator from Solanum tuberosum.

[0066] SEQ ID NO:8 is the nucleotide sequence of the attR1 site.

[0067] SEQ ID NO:9 is the nucleotide sequence of the attR2 site.

[0068] SEQ ID NO:10 is the nucleotide sequence of the attB1 site.

[0069] SEQ ID NO:11 is the nucleotide sequence of the attB2 site.

[0070] SEQ ID NO:12 is the nucleotide sequence of the At5g62180-5′attB forward primer, containing the attB1 sequence, used to amplify the At5g62180 protein-coding region.

[0071] SEQ ID NO:13 is the nucleotide sequence of the At5g62180-3′attB reverse primer, containing the attB2 sequence, used to amplify the At5g62180 protein-coding region.

[0072] SEQ ID NO:14 is the nucleotide sequence of the VC062 primer, containing the T3 promoter and attB1 site, useful to amplify cDNA inserts cloned into a BLUESCRIPT® II SK(+) vector (Stratagene).

[0073] SEQ ID NO:15 is the nucleotide sequence of the VC063 primer, containing the T7 promoter and attB2 site, useful to amplify cDNA inserts cloned into a BLUESCRIPT® II SK(+) vector (Stratagene).

[0074] SEQ ID NO:16 corresponds to NCBI GI No. 30697645, which is the cDNA sequence from locus At5g62180 encoding an Arabidopsis DTP4 polypeptide.

[0075] SEQ ID NO:17 corresponds to the CDS sequence from locus At5g62180 encoding an Arabidopsis DTP4 polypeptide.

[0076] SEQ ID NO:18 corresponds to the amino acid sequence of At5g62180 encoded by SEQ ID NO:17.

[0077] SEQ ID NO:19 corresponds to a sequence of At5g62180 with alternative codons.

[0078] Table 1 presents SEQ ID NOs for the nucleotide sequences obtained from cDNA clones encoding DTP4 polypeptides from Zea mays, Dennstaedtia punctilobula, Sesbania bispinosa, Artemisia tridentata, Lamium amplexicaule, 10 Eschscholzia californica, Linum perenne, Delosperma nubigenum, Peperomia caperata, Triglochin maritime, Chlorophytum comosum, Canna×generalis.

[0079] The SEQ ID NOs for the corresponding amino acid sequences encoded by the cDNAs are also presented.

[0080] Table 2 presents SEQ ID NOs for more DTP4 polypeptides from public databases.

TABLE 1
cDNAs Encoding DTP4 Polypeptides

| | | SEQ ID NO: | SEQ ID NO: |
|---|---|---|---|
| Plant | Clone Designation* | (Nucleotide) | (Amino Acid) |
| Corn | cfp2n.pk010.p21 | 20 | 21 |
| Corn | cfp2n.pk070.m7 | 22 | 23 |
| Corn | cfp3n.pk007.i9 | 24 | 25 |
| Corn | pco524093 | 26 | 27 |
| Corn | Maize_DTP4-1 | 28 | 29 |
| Corn | Maize_DTP4-2 | 30 | 31 |
| Corn | Maize_DTP4-3 | 32 | 33 |
| Dennstaedtia punctilobula | ehsf2n.pk140.e11 | 34 | 35 |
| Dennstaedtia punctilobula | ehsf2n.pk147.p21 | 36 | 37 |
| Sesbania bispinosa | sesgr1n.pk117.j17 | 38 | 39 |
| Sesbania bispinosa | sesgr1n.pk129.m19 | 40 | 41 |
| Sesbania bispinosa | sesgr1n.pk062.h8 | 42 | 43 |
| Sesbania bispinosa | sesgr1n.pk107.c11 | 44 | 45 |
| Sesbania bispinosa | sesgr1n.pk079.h12 | 46 | 47 |
| Artemisia tridentata | arttr1n.pk125.i16 | 48 | 49 |
| Artemisia tridentata | arttr1n.pk029.e11 | 50 | 51 |
| Artemisia tridentata | arttr1n.pk222.b19 | 52 | 53 |
| Artemisia tridentata | arttr1n.pk120.m9 | 54 | 55 |
| Lamium amplexicaule | hengr1n.pk028.m4 | 56 | 57 |
| Delosperma nubigenum | icegr1n.pk156.e13 | 58 | 59 |
| Peperomia caperata (Emerald | pepgr1n.pk128.o15 | 60 | 61 |
| ripple Peperomia) | | | |
| Peperomia caperata (Emerald | pepgr1n.pk190.l24 | 94 | 95 |
| ripple Peperomia) | | | |
| Peperomia caperata (Emerald | pepgr1n.pk082.c4 | 96 | 97 |
| ripple Peperomia) | | | |
| Linum perenne | lpgr1n.pk005.f19 | 98 | 99 |
| Lamium amplexicaule | hengr1n.pk014.d12 | 100 | 101 |
| Eschscholzia californica | ecalgr1n.pk137.m22 | 102 | 103 |
| Eschscholzia californica | ecalgr1n.pk130.b16 | 104 | 105 |
| Amaranthus hypochondriacus | ahgr1c.pk108.k16 | 106 | 107 |
| Sesbania bispinosa | sesgr1n.pk022.n10_short | 108 | 109 |
| Artemisia tridentata | arttr1n.pk193.a17 | 110 | 111 |
| Artemisia tridentata | arttr1n.pk090.l10 | 112 | 113 |
| Abutilon theophrasti | abtgr1na.pk050.o13 | 150 | 151 |
| Abutilon theophrasti | abtgr1na.pk056.o14 | 152 | 153 |
| Abutilon theophrasti | abtgr1na.pk067.p20 | 154 | 155 |
| Amaranthus hypochondriacus | ahgr1c.pk004.k17 | 156 | 157 |
| Amaranthus hypochondriacus | ahgr1c.pk206.b6 | 158 | 159 |
| Amaranthus hypochondriacus | ahgr1c.pk239.c17 | 160 | 161 |
| Amaranthus hypochondriacus | ahgr1c.pk101.a18 | 162 | 163 |
| Amaranthus hypochondriacus | ahgr1c.pk101.b2 | 164 | 165 |
| Amaranthus hypochondriacus | ahgr1c.pk108.m2 | 166 | 167 |
| Amaranthus hypochondriacus | ahgr1c.pk200.a3.r | 168 | 169 |
| Amaranthus hypochondriacus | ahgr1c.pk228.f18 | 170 | 171 |
| Artemisia tridentata | arttr1n.pk011.m19 | 172 | 173 |
| Artemisia tridentata | arttr1n.pk025.j17 | 174 | 175 |
| Artemisia tridentata | arttr1n.pk030.b19 | 176 | 177 |
| Artemisia tridentata | arttr1n.pk042.k20 | 178 | 179 |
| Artemisia tridentata | arttr1n.pk123.i19 | 180 | 181 |
| Artemisia tridentata | arttr1n.pk183.a10 | 182 | 183 |
| Artemisia tridentata | arttr1n.pk101.f15 | 184 | 185 |
| Artemisia tridentata | arttr1n.pk195.e16 | 186 | 187 |
| Artemisia tridentata | arttr1n.pk047.j22 | 188 | 189 |
| Artemisia tridentata | arttr1n.pk050.l17 | 190 | 191 |
| Artemisia tridentata | arttr1n.pk006.b12.r | 192 | 193 |
| Artemisia tridentata | arttr1n.pk085.i10 | 194 | 195 |
| Artemisia tridentata | arttr1n.pk144.e19 | 196 | 197 |
| Artemisia tridentata | arttr1n.pk147.k17 | 198 | 199 |
| Artemisia tridentata | arttr1n.pk014.h9 | 200 | 201 |
| Artemisia tridentata | arttr1n.pk029.d9 | 202 | 203 |
| Artemisia tridentata | arttr1n.pk187.n1 | 204 | 205 |
| Artemisia tridentata | arttr1n.pk019.g5 | 206 | 207 |
| Artemisia tridentata | arttr1n.pk027.i2 | 208 | 209 |
| Artemisia tridentata | arttr1n.pk029.e6 | 210 | 211 |
| Artemisia tridentata | arttr1n.pk029.p23 | 212 | 213 |
| Artemisia tridentata | arttr1n.pk046.a17 | 214 | 215 |
| Artemisia tridentata | arttr1n.pk138.c10 | 216 | 217 |
| Artemisia tridentata | arttr1n.pk152.i9 | 218 | 219 |
| Artemisia tridentata | arttr1n.pk155.a16 | 220 | 221 |
| Artemisia tridentata | arttr1n.pk158.k23 | 222 | 223 |
| Artemisia tridentata | arttr1n.pk160.h6 | 224 | 225 |
| Artemisia tridentata | arttr1n.pk165.c21 | 226 | 227 |
| Artemisia tridentata | arttr1n.pk165.h5 | 228 | 229 |
| Artemisia tridentata | arttr1n.pk197.d11 | 230 | 231 |
| Artemisia tridentata | arttr1n.pk199.d13 | 232 | 233 |
| Artemisia tridentata | arttr1n.pk214.l5 | 234 | 235 |
| Artemisia tridentata | arttr1n.pk218.l1 | 236 | 237 |
| Artemisia tridentata | arttr1n.pk062.b18 | 238 | 239 |
| Artemisia tridentata | arttr1n.pk104.g4 | 240 | 241 |
| Artemisia tridentata | arttr1n.pk136.n10 | 242 | 243 |
| Artemisia tridentata | arttr1n.pk136.p12 | 244 | 245 |
| Artemisia tridentata | arttr1n.pk175.o6 | 246 | 247 |
| Artemisia tridentata | arttr1n.pk185.f17 | 248 | 249 |
| Artemisia tridentata | arttr1n.pk206.d14 | 250 | 251 |
| Artemisia tridentata | arttr1n.pk212.n16 | 252 | 253 |
| Artemisia tridentata | arttr1n.pk218.n13 | 254 | 255 |
| Artemisia tridentata | arttr1n.pk248.n3 | 256 | 257 |
| Artemisia tridentata | arttr1n.pk203.b15 | 258 | 259 |
| Canna × generalis | cannagr1n306.pk070.m16 | 260 | 261 |
| Canna × generalis | cannagr1n306.pk021.c13 | 262 | 263 |
| Chlorophytum comosum | ccgr1n308l56.pk005.i7 | 264 | 265 |
| Chlorophytum comosum | ccgr1n.pk045.c6 | 266 | 267 |
| Chlorophytum comosum | ccgr1n308l56.pk011.c6 | 268 | 269 |
| Delosperma nubigenum | icegr1n.pk047.c2 | 270 | 271 |
| Delosperma nubigenum | icegr1n.pk197.c3 | 272 | 273 |
| Delosperma nubigenum | icegr1n.pk213.k16 | 274 | 275 |
| Delosperma nubigenum | icegr1n.pk014.l3.r | 276 | 277 |
| Delosperma nubigenum | icegr1n.pk116.d7 | 278 | 279 |
| Delosperma nubigenum | icegr1n.pk035.p22.r | 280 | 281 |
| Delosperma nubigenum | icegr1n.pk073.g5.r | 282 | 283 |
| Delosperma nubigenum | icegr1n.pk162.b18 | 284 | 285 |
| Delosperma nubigenum | icegr1n.pk219.c22 | 286 | 287 |
| Dennstaedtia punctilobula | ehsf2n.pk203.m17 | 288 | 289 |
| Dennstaedtia punctilobula | ehsf2n.pk123.n16 | 290 | 291 |
| Dennstaedtia punctilobula | ehsf2n.pk148.p1 | 292 | 293 |
| Dennstaedtia punctilobula | ehsf2n.pk124.a11 | 294 | 295 |
| Dennstaedtia punctilobula | ehsf2n.pk221.a15 | 296 | 297 |
| Dennstaedtia punctilobula | ehsf2n.pk233.n18 | 298 | 299 |
| Dennstaedtia punctilobula | ehsf2n.pk049.b14 | 300 | 301 |
| Dennstaedtia punctilobula | ehsf2n.pk171.m4 | 302 | 303 |
| Eschscholzia californica | ecalgr1n.pk193.p13.r | 304 | 305 |
| Eschscholzia californica | ecalgr1n.pk130.g3 | 306 | 307 |
| Eschscholzia californica | ecalgr1n.pk016.p16 | 308 | 309 |
| Eschscholzia californica | ecalgr1n.pk042.h15 | 310 | 311 |
| Eschscholzia californica | ecalgr1n.pk128.h17 | 312 | 313 |
| Eschscholzia californica | ecalgr1n.pk132.f19 | 314 | 315 |
| Eschscholzia californica | ecalgr1n.pk008.m5 | 316 | 317 |
| Eschscholzia californica | ecalgr1n.pk063.d23 | 318 | 319 |
| Eschscholzia californica | ecalgr1n.pk070.g7 | 320 | 321 |
| Eschscholzia californica | ecalgr1n.pk121.e22 | 322 | 323 |
| Eschscholzia californica | ecalgr1n.pk132.f20 | 324 | 325 |
| Eschscholzia californica | ecalgr1n.pk140.c5 | 326 | 327 |
| Eschscholzia californica | ecalgr1n.pk145.e6 | 328 | 329 |
| Eschscholzia californica | ecalgr1n.pk172.m18 | 330 | 331 |
| Eschscholzia californica | ecalgr1n.pk194.e7 | 332 | 333 |
| Eschscholzia californica | ecalgr1n.pk152.p24 | 334 | 335 |
| Eschscholzia californica | ecalgr1n.pk007.a21 | 336 | 337 |
| Eschscholzia californica | ecalgr1n.pk028.m20 | 338 | 339 |
| Eschscholzia californica | ecalgr1n.pk049.n17 | 340 | 341 |
| Eschscholzia californica | ecalgr1n.pk086.l10 | 342 | 343 |
| Eschscholzia californica | ecalgr1n.pk092.n18.r | 344 | 345 |
| Eschscholzia californica | ecalgr1n.pk095.l21 | 346 | 347 |
| Eschscholzia californica | ecalgr1n.pk111.h1 | 348 | 349 |
| Eschscholzia californica | ecalgr1n.pk142.b14 | 350 | 351 |
| Eschscholzia californica | ecalgr1n.pk169.l22 | 352 | 353 |
| Eschscholzia californica | ecalgr1n.pk192.l15 | 354 | 355 |
| Lamium amplexicaule | hengr1n.pk056.e14 | 356 | 357 |
| Lamium amplexicaule | hengr1n.pk015.c10 | 358 | 359 |
| Lamium amplexicaule | hengr1n.pk019.g3 | 360 | 361 |
| Lamium amplexicaule | hengr1n.pk169.h24 | 362 | 363 |
| Lamium amplexicaule | hengr1n.pk019.a8 | 364 | 365 |
| Lamium amplexicaule | hengr1n.pk042.e4 | 366 | 367 |
| Lamium amplexicaule | hengr1n.pk106.i3 | 368 | 369 |
| Lamium amplexicaule | hengr1n.pk183.g9 | 370 | 371 |
| Lamium amplexicaule | hengr1n.pk006.e14 | 372 | 373 |
| Lamium amplexicaule | hengr1n.pk139.k22.r | 374 | 375 |
| Lamium amplexicaule | hengr1n.pk205.e4 | 376 | 377 |
| Lamium amplexicaule | hengr1n.pk083.p6.r | 378 | 379 |
| Lamium amplexicaule | hengr1n.pk099.i9 | 380 | 381 |
| Lamium amplexicaule | hengr1n.pk132.n2 | 382 | 383 |
| Lamium amplexicaule | hengr1n.pk166.h13 | 384 | 385 |
| Lamium amplexicaule | hengr1n.pk191.p1 | 386 | 387 |
| Lamium amplexicaule | hengr1n.pk252.o11 | 388 | 389 |
| Lamium amplexicaule | hengr1n.pk007.p2 | 390 | 391 |
| Lamium amplexicaule | hengr1n.pk121.a23 | 392 | 393 |
| Lamium amplexicaule | hengr1n.pk062.j19 | 394 | 395 |
| Lamium amplexicaule | hengr1n.pk104.j11 | 396 | 397 |
| Lamium amplexicaule | hengr1n.pk124.a20 | 398 | 399 |
| Lamium amplexicaule | hengr1n.pk182.c11 | 400 | 401 |
| Lamium amplexicaule | hengr1n.pk252.b18 | 402 | 403 |
| Linum perenne | lpgr1n.pk122.d12 | 404 | 405 |
| Linum perenne | lpgr1n.pk049.d20 | 406 | 407 |
| Linum perenne | lpgr1n.pk023.c23.r | 408 | 409 |
| Linum perenne | lpgr1n.pk008.f18 | 410 | 411 |
| Linum perenne | lpgr1n.pk085.m11 | 412 | 413 |
| Linum perenne | lpgr1n.pk102.p22 | 414 | 415 |
| Linum perenne | lpgr1n.pk055.f13.r | 416 | 417 |
| Linum perenne | lpgr1n.pk059.i18.r | 418 | 419 |
| Linum perenne | lpgr1n.pk074.m24.r | 420 | 421 |
| Linum perenne | lpgr1n.pk016.a14 | 422 | 423 |
| Linum perenne | lpgr1n.pk030.p21 | 424 | 425 |
| Linum perenne | lpgr1n.pk035.j14 | 426 | 427 |
| Linum perenne | lpgr1n.pk060.a17 | 428 | 429 |
| Peperomia caperata | pepgr1n.pk053.k21 | 430 | 431 |
| Peperomia caperata | pepgr1n.pk070.b11 | 432 | 433 |
| Peperomia caperata | pepgr1n.pk098.f11 | 434 | 435 |
| Peperomia caperata | pepgr1n.pk048.n2 | 436 | 437 |
| Peperomia caperata | pepgr1n.pk240.d2 | 438 | 439 |
| Peperomia caperata | pepgr1n.pk075.j19 | 440 | 441 |
| Peperomia caperata | pepgr1n.pk143.g17 | 442 | 443 |
| Peperomia caperata | pepgr1n.pk224.n19 | 444 | 445 |
| Peperomia caperata | pepgr1n.pk236.p10 | 446 | 447 |
| Sesbania bispinosa | sesgr1n.pk067.o14 | 448 | 449 |
| Sesbania bispinosa | sesgr1n.pk069.p21 | 450 | 451 |
| Sesbania bispinosa | sesgr1n.pk140.i18 | 452 | 453 |
| Sesbania bispinosa | sesgr1n.pk119.d14 | 454 | 455 |
| Sesbania bispinosa | sesgr1n.pk059.f22 | 456 | 457 |
| Sesbania bispinosa | sesgr1n.pk108.j9 | 458 | 459 |
| Sesbania bispinosa | sesgr1n.pk019.p14 | 460 | 461 |
| Sesbania bispinosa | sesgr1n.pk117.d15 | 462 | 463 |
| Sesbania bispinosa | sesgr1n.pk132.p20 | 464 | 465 |
| Sesbania bispinosa | sesgr1n.pk142.e7 | 466 | 467 |
| Sesbania bispinosa | sesgr1n.pk151.n5 | 468 | 469 |
| Sesbania bispinosa | sesgr1n.pk154.p5 | 470 | 471 |
| Sesbania bispinosa | sesgr1n.pk172.f15 | 472 | 473 |
| Sesbania bispinosa | sesgr1n.pk120.c11 | 474 | 475 |
| Sesbania bispinosa | sesgr1n.pk007.h12 | 476 | 477 |
| Sesbania bispinosa | sesgr1n.pk024.h4 | 478 | 479 |
| Sesbania bispinosa | sesgr1n.pk028.i7 | 480 | 481 |
| Sesbania bispinosa | sesgr1n.pk034.p15 | 482 | 483 |
| Sesbania bispinosa | sesgr1n.pk041.p8 | 484 | 485 |
| Sesbania bispinosa | sesgr1n.pk080.f8 | 486 | 487 |
| Sesbania bispinosa | sesgr1n.pk083.d4 | 488 | 489 |
| Sesbania bispinosa | sesgr1n.pk126.e15 | 490 | 491 |
| Sesbania bispinosa | sesgr1n.pk172.d10 | 492 | 493 |
| Triglochin maritima | tmgr2n.pk038.g19 | 494 | 495 |
| Triglochin maritima | tmgr2n308l56.pk045.l21 | 496 | 497 |
| Triglochin maritima | tmgr2n.pk042.m4.r | 498 | 499 |
| Triglochin maritima | tmgr2n.pk009.b15 | 500 | 501 |
| Triglochin maritima | tmgr2n.pk020.a24 | 502 | 503 |
| Triglochin maritima | tmgr2n.pk036.i19 | 504 | 505 |
| Triglochin maritima | tmgr2n.pk048.f6 | 506 | 507 |
| Triglochin maritima | tmgr2n308l56.pk031.p21 | 508 | 509 |

*The “Full-Insert Sequence” (“FIS”) is the sequence of the entire cDNA insert.

[0081] SEQ ID NO:62 is the nucleotide sequence encoding AT-CXE8 polypeptide; corresponding to At2g45600 locus (Arabidopsis thaliana).

[0082] SEQ ID NO:63 is the AT-CXE8 nucleotide sequence with alternative codons.

[0083] SEQ ID NO:64 is the amino acid sequence corresponding to NCBI GI No. 75318485 (AT-CXE8), encoded by the sequence given in SEQ ID NO:62 and 63; (Arabidopsis thaliana).

[0084] SEQ ID NO:65 is the amino acid sequence corresponding to NCBI GI No. 75318486 (AT-CXE9), encoded by the locus At2g45610.1 (Arabidopsis thaliana).

[0085] SEQ ID NO:66 is the amino acid sequence corresponding to NCBI GI No. 75335430 (AT-CXE18), encoded by the locus At5g23530.1 (Arabidopsis thaliana).

[0086] SEQ ID NO:67 is the amino acid sequence corresponding to the locus LOC_Os08g43430.1, a rice (japonica) predicted protein from the Michigan State University Rice Genome Annotation Project Osa1 release 6.

[0087] SEQ ID NO:68 is the amino acid sequence corresponding to the locus LOC_Os03g14730.1, a rice (japonica) predicted protein from the Michigan State University Rice Genome Annotation Project Osa1 release 6.

[0088] SEQ ID NO:69 is the amino acid sequence corresponding to the locus LOC_Os07g44890.1, a rice (japonica) predicted protein from the Michigan State University Rice Genome Annotation Project Osa1 release 6.

[0089] SEQ ID NO:70 is the amino acid sequence corresponding to the locus LOC_Os07g44860.1, a rice (japonica) predicted protein from the Michigan State University Rice Genome Annotation Project Osa1 release 6.

[0090] SEQ ID NO:71 is the amino acid sequence corresponding to the locus LOC_Os07g44910.1, a rice (japonica) predicted protein from the Michigan State University Rice Genome Annotation Project Osa1 release 6.

[0091] SEQ ID NO:72 is the amino acid sequence corresponding to Sb07g025010.1, a sorghum (Sorghum bicolor) predicted protein from the Sorghum JGI genomic sequence version 1.4 from the US Department of energy Joint Genome Institute.

[0092] SEQ ID NO:73 is the amino acid sequence corresponding to Sb01g040930.1, a sorghum (Sorghum bicolor) predicted protein from the Sorghum JGI genomic sequence version 1.4 from the US Department of energy Joint Genome Institute.

[0093] SEQ ID NO:74 is the amino acid sequence corresponding to Glyma20g29190.1, a soybean (Glycine max) predicted protein from predicted coding sequences from Soybean JGI Glyma1.01 genomic sequence from the US Department of energy Joint Genome Institute.

[0094] SEQ ID NO:75 is the amino acid sequence corresponding to Glyma20g29200.1, a soybean (Glycine max) predicted protein from predicted coding sequences from Soybean JGI Glyma1.01 genomic sequence from the US Department of energy Joint Genome Institute.

[0095] SEQ ID NO:76 is the amino acid sequence corresponding to Glyma16g32560.1, a soybean (Glycine max) predicted protein from predicted coding sequences from Soybean JGI Glyma1.01 genomic sequence from the US Department of energy Joint Genome Institute.

[0096] SEQ ID NO:77 is the amino acid sequence corresponding to Glyma07g09040.1, a soybean (Glycine max) predicted protein from predicted coding sequences from Soybean JGI Glyma1.01 genomic sequence from the US Department of energy Joint Genome Institute.

[0097] SEQ ID NO:78 is the amino acid sequence corresponding to Glyma07g09030.1, a soybean (Glycine max) predicted protein from predicted coding sequences from Soybean JGI Glyma1.01 genomic sequence from the US Department of energy Joint Genome Institute.

[0098] SEQ ID NO:79 is the amino acid sequence corresponding to Glyma03g02330.1, a soybean (Glycine max) predicted protein from predicted coding sequences from Soybean JGI Glyma1.01 genomic sequence from the US Department of energy Joint Genome Institute.

[0099] SEQ ID NO:80 is the amino acid sequence corresponding to Glyma09g27500.1, a soybean (Glycine max) predicted protein from predicted coding sequences from Soybean JGI Glyma1.01 genomic sequence from the US Department of energy Joint Genome Institute.

[0100] SEQ ID NO:81 the amino acid sequence presented in SEQ ID NO:12 of U.S. Pat. No. 7,915,050 (Arabidopsis thaliana).

[0101] SEQ ID NO:82 is the amino acid sequence corresponding to NCBI GI No. 194704970 (Zea mays).

[0102] SEQ ID NO:83 the amino acid sequence presented in SEQ ID NO:260345 of US Patent Publication No. US20120216318 (Zea mays).

[0103] SEQ ID NO:84 is the amino acid sequence corresponding to NCBI GI No. 195636334 (Zea mays).

[0104] SEQ ID NO:85 the amino acid sequence presented in SEQ ID NO:331675 of US Patent Publication No. US20120216318.

[0105] SEQ ID NO:86 is the amino acid sequence corresponding to NCBI GI No. 194707422 (Zea mays).

[0106] SEQ ID NO:87 the amino acid sequence presented in SEQ ID NO:7332 of U.S. Pat. No. 8,343,764 (Zea mays).

[0107] SEQ ID NO:88 is the amino acid sequence corresponding to NCBI GI No. 223948401 (Zea mays).

[0108] SEQ ID NO:89 the amino acid sequence presented in SEQ ID NO:16159 of U.S. Pat. No. 7,569,389 (Zea mays).

[0109] SEQ ID NO:90 is the amino acid sequence corresponding to NCBI GI No. 23495723 (Oryza sativa).

[0110] SEQ ID NO:91 the amino acid sequence presented in SEQ ID NO:50819 of US Patent Publication No. US20120017292 (Zea mays).

[0111] SEQ ID NO:92 is the amino acid sequence corresponding to NCBI GI No. 215768720 (Oryza sativa).

[0112] SEQ ID NO:93 the amino acid sequence presented in SEQ ID NO:10044 of U.S. Pat. No. 8,362,325 (Sorghum bicolor).

[0113] SEQ ID NO:114 is the nucleotide sequence of a DTP4 polypeptide from Carica papaya.

[0114] SEQ ID NO:115 is the amino acid sequence of a polypeptide, encoded by the nucleotide sequence presented in SEQ ID NO:114 (Carica papaya).

[0115] SEQ ID NO:116 is the nucleotide sequence of a polypeptide from Eutrema salsugineum.

[0116] SEQ ID NO:117 is the amino acid sequence of a polypeptide, encoded by the nucleotide sequence presented in SEQ ID NO:116 (Eutrema salsugineum).

[0117] SEQ ID NO:118 is the nucleotide sequence of an assembled contig from Brassica napus and Brassica oleracea sequences(Bn-Bo).

[0118] SEQ ID NO:119 is the amino acid sequence of a polypeptide, encoded by the nucleotide sequence presented in SEQ ID NO:118.

[0119] SEQ ID NO:120 is the nucleotide sequence of an assembled contig from Brassica napus and Brassica oleracea sequences (Bole-someBnap).

[0120] SEQ ID NO:121 is the amino acid sequence of a polypeptide, encoded by the nucleotide sequence presented in SEQ ID NO:120.

[0121] SEQ ID NO:122 is the nucleotide sequence of an assembled contig of ESTs from Brassica napus.

[0122] SEQ ID NO:123 is the amino acid sequence of a polypeptide, encoded by the nucleotide sequence presented in SEQ ID NO:122.

[0123] SEQ ID NO:124 is the nucleotide sequence of an assembled contig of ESTs from Citrus sinensis and Citrus clementina.

[0124] SEQ ID NO:125 is the amino acid sequence of a DTP4 polypeptide from Citrus sinensis and Citrus clementina.

[0125] SEQ ID NO:126 is the amino acid sequence of a DTP4 polypeptide from Raphanus sativus.

[0126] SEQ ID NO:127 is the amino acid sequence of a DTP4 polypeptide from Arabidopsis lyrata.

[0127] SEQ ID NO:128 is the amino acid sequence of a DTP4 polypeptide from Olimarabidopsis pumila.

[0128] SEQ ID NO:129 is the amino acid sequence of a DTP4 polypeptide from Capsella rubella.

[0129] SEQ ID NO:130 is the amino acid sequence of a DTP4 polypeptide from Capsella rubella.

[0130] SEQ ID NO:131 is the amino acid sequence of a DTP4 polypeptide from Brassica rapa subsp. pekinensis.

[0131] SEQ ID NO:132 is the amino acid sequence of a DTP4 polypeptide from Brassica rapa subsp. pekinensis.

[0132] SEQ ID NO:133 is the amino acid sequence of a DTP4 polypeptide from Prunus persica.

[0133] SEQ ID NOS:134 and 135 are the amino acid sequences of 2 DTP4 homologs from Vitis vinifera.

[0134] SEQ ID NO:136 is the nucleotide sequence of a Vitis vinifera DTP4 polypeptide named GSVIVT01027568001 (unique_1).

[0135] SEQ ID NO:137 is the amino acid sequence of the DTP4 polypeptide sequence of a Vitis vinifera DTP4 polypeptide (GSVIVT01027568001; unique_1).

[0136] SEQ ID NO:138 is the nucleotide sequence of a Vitis vinifera DTP4 homolog named GSVIVT01027566001 (unique_2).

[0137] SEQ ID NO:139 is the amino acid sequence of the DTP4 polypeptide sequence of a Vitis vinifera DTP4 polypeptide (GSVIVT01027566001; unique_2).

[0138] SEQ ID NO:140 is the nucleotide sequence of a Vitis vinifera DTP4 homolog named GSVIVT01027569001 (unique_3).

[0139] SEQ ID NO:141 is the amino acid sequence of the DTP4 polypeptide sequence of a Vitis vinifera DTP4 polypeptide (GSVIVT01027569001; unique_3).

[0140] SEQ ID NOS:142-149 are the amino acid sequences of DTP4 polypeptides from Populus trichocarpa.

[0141] SEQ ID NO:627 is the amino acid sequence encoded by the locus At1g49660 (AT-CXE5) (Arabidopsis thaliana).

[0142] SEQ ID NO:628 is the amino acid sequence encoded by the locus At5g16080 (AT-CXE17) (Arabidopsis thaliana).

[0143] SEQ ID NO:629 is the sequence of the fusion protein of AT-DTP4 overexpressed in E. coli.

[0144] SEQ ID NO:630 is the consensus sequence obtained from the alignment of sequences given in FIG. 1

TABLE 2
DTP4 polypeptides

| | | SEQ ID NO: |
|---|---|---|
| Plant | Clone Designation* | (Amino Acid) |
| Arabidopsis halleri | Araha.2214s0019.1.p | 510 |
| Arabidopsis lyrata | D7LCK9_Al | 511 |
| Arabidopsis thaliana | AT3G05120.1_At_CXE10 | 512 |
| Arabidopsis thaliana | AT3G63010.1_At_CXE14 | 513 |
| Arabidopsis thaliana | AT5G27320.1_At_CXE19 | 514 |
| Arabidopsis thaliana | At5g06570_AtCXE15 | 515 |
| Arabidopsis thaliana | At1g68620_AtCXE6 | 516 |
| Boechera stricta | Bostr.25993s0214.1.p | 517 |
| Boechera stricta | Bostr.26833s0018.1.p | 518 |
| Boechera stricta | Bostr.26675s0205.1.p | 519 |
| Brachypodium distachyon | Bradi1g67930.1_BRADI | 520 |
| Brachypodium distachyon | Bradi3g42207.1_BRADI | 521 |
| Brassica rapa | Brara.E00516.1.p | 522 |
| Brassica rapa | Brara.I00681.1.p | 523 |
| Brassica rapa | Brara.B03796.1.p | 524 |
| Brassica rapa | Brara.B03797.1.p | 525 |
| Brassica rapa | Brara.E01694.1.p | 526 |
| Capsella grandiflora | Cagra.21374s0001.1.p | 527 |
| Capsella grandiflora | Cagra.4003s0009.1.p | 528 |
| Capsella grandiflora | Cagra.2481s0010.1.p | 529 |
| Capsella rubella | R0HTV4_Cr | 530 |
| Capsella rubella | Carubv10011237m | 531 |
| Capsella rubella | Carubv10011932m | 532 |
| Carica papaya | Cpap_18.158_PACid_16411302 | 533 |
| Carica papaya | Cpap_18.159_PACid_16411303 | 534 |
| Eutrema salsugineum | Thhalv10011663m | 535 |
| Glycine max | Glyma07g09030.1 | 536 |
| Glycine max | Glyma02g17010.1 | 537 |
| Glycine max | Glyma03g30460.1 | 538 |
| Glycine max | Glyma09g28580.1 | 539 |
| Glycine max | Glyma09g28590.1 | 540 |
| Glycine max | Glyma10g02790.1 | 541 |
| Glycine max | Glyma10g29910.1 | 542 |
| Glycine max | Glyma16g33320.1 | 543 |
| Glycine max | Glyma16g33330.1 | 544 |
| Glycine max | Glyma16g33340.1 | 545 |
| Glycine max | Glyma20g37430.1 | 546 |
| Glycine max | Glyma02g27090.1 | 547 |
| Glycine max | Glyma03g36380.1 | 548 |
| Glycine max | Glyma06g46520.1 | 549 |
| Glycine max | Glyma06g46520.2 | 550 |
| Glycine max | Glyma10g11060.1 | 551 |
| Glycine max | Glyma12g10250.1 | 552 |
| Glycine max | Glyma19g39030.1 | 553 |
| Glycine max | Glyma08g47930.1 | 554 |
| Glycine max | Glyma10g42260.1 | 555 |
| Glycine max | Glyma17g31740.1 | 556 |
| Glycine max | Glyma18g53580.1 | 557 |
| Glycine max | Glyma20g24780.1 | 558 |
| Gossypium raimondii | Gorai.007G093200.1 | 559 |
| Gossypium raimondii | Gorai.008G282100.1 | 560 |
| Oryza sativa | LOC_Os05g33730.1 | 561 |
| Oryza sativa | LOC_Os06g20200.1 | 562 |
| Oryza sativa | LOC_Os07g41590.1 | 563 |
| Oryza sativa | LOC_Os07g44850.1 | 564 |
| Oryza sativa | LOC_Os07g44900.1 | 565 |
| Oryza sativa | LOC_Os11g13570.1 | 566 |
| Oryza sativa | LOC_Os11g13630.1 | 567 |
| Oryza sativa | LOC_Os11g13670.1 | 568 |
| Oryza sativa | LOC_Os01g06060.1_OsCXE4 | 569 |
| Oryza sativa | LOC_Os01g06210.1_OsCXE2 | 570 |
| Oryza sativa | LOC_Os01g06220.1_OsCXE1 | 571 |
| Oryza sativa | LOC_Os03g57640.1 | 572 |
| Oryza sativa | LOC_Os07g06830.1 | 573 |
| Oryza sativa | LOC_Os07g06840.1 | 574 |
| Oryza sativa | LOC_Os07g06850.1 | 575 |
| Oryza sativa | LOC_Os07g06860.1 | 576 |
| Oryza sativa | LOC_Os07g06880.1 | 577 |
| Oryza sativa | LOC_Os03g15270.1 | 578 |
| Sorghum bicolor | Sb02g038880.1 | 579 |
| Sorghum bicolor | Sb02g041000.1 | 580 |
| Sorghum bicolor | Sb02g041040.1 | 581 |
| Sorghum bicolor | Sb02g041050.1 | 582 |
| Sorghum bicolor | Sb05g007270.1 | 583 |
| Sorghum bicolor | Sb05g007290.1 | 584 |
| Sorghum bicolor | Sb09g020080.1 | 585 |
| Sorghum bicolor | Sb09g020080.2 | 586 |
| Sorghum bicolor | Sb01g005720.1 | 587 |
| Sorghum bicolor | Sb02g003560.1 | 588 |
| Sorghum bicolor | Sb02g003570.1 | 589 |
| Sorghum bicolor | Sb02g003580.1 | 590 |
| Sorghum bicolor | Sb02g003600.1 | 591 |
| Sorghum bicolor | Sb02g003610.1 | 592 |
| Sorghum bicolor | Sb02g003620.1 | 593 |
| Sorghum bicolor | Sb02g003630.1 | 594 |
| Sorghum bicolor | Sb02g020810.1 | 595 |
| Sorghum bicolor | Sb03g005560.1 | 596 |
| Sorghum bicolor | Sb03g005570.1 | 597 |
| Sorghum bicolor | Sb03g005580.1 | 598 |
| Sorghum bicolor | Sb03g005590.1 | 599 |
| Sorghum bicolor | Sb01g040580.1 | 600 |
| Eutrema salsugineum | Thhalv10001557m_PACid_20189097 | 601 |
| Eutrema salsugineum | Thhalv10001767m_PACid_20188989 | 602 |
| Theobroma cacao | Thecc1EG005469t1 | 603 |
| Theobroma cacao | Thecc1EG015038t1_edit | 604 |
| Theobroma cacao | Thecc1EG032452t1 | 605 |
| Vitis vinifera | GSVIVT01027566001 | 606 |
| Vitis vinifera | GSVIVT01027569001 | 607 |
| Zea mays | Maize_DTP4-4 | 608 |
| Zea mays | Maize_DTP4-5 | 609 |
| Zea mays | Maize_DTP4-6 | 610 |
| Zea mays | Maize_DTP4-7 | 611 |
| Zea mays | Maize_DTP4-8 | 612 |
| Zea mays | Maize_DTP4-9 | 613 |
| Zea mays | Maize_DTP4-10 | 614 |
| Zea mays | Maize_DTP4-11 | 615 |
| Zea mays | Maize_DTP4-12 | 616 |
| Zea mays | Maize_DTP4-13 | 617 |
| Zea mays | Maize_DTP4-14 | 618 |
| Zea mays | Maize_DTP4-15 | 619 |
| Zea mays | Maize_DTP4-16 | 620 |
| Zea mays | Maize_DTP4-17 | 621 |
| Zea mays | Maize_DTP4-18 | 622 |
| Zea mays | Maize_DTP4-19 | 623 |
| Zea mays | Maize_DTP4-20 | 624 |
| Zea mays | Maize_DTP4-21 | 625 |
| Zea mays | Maize_DTP4-22 | 626 |

[0145] The sequence descriptions and Sequence Listing attached hereto comply with the rules governing nucleotide and/or amino acid sequence disclosures in patent applications as set forth in 37 C.F.R. §1.821-1.825.

[0146] The Sequence Listing contains the one letter code for nucleotide sequence characters and the three letter codes for amino acids as defined in conformity with the IUPAC-IUBMB standards described in Nucleic Acids Res. 13:3021-3030 (1985) and in the Biochemical J. 219 (No. 2):345-373 (1984) which are herein incorporated by reference. The symbols and format used for nucleotide and amino acid sequence data comply with the rules set forth in 37 C.F.R. §1.822.

### DETAILED DESCRIPTION

[0147] The disclosure of each reference set forth herein is hereby incorporated by reference in its entirety.

[0148] As used herein and in the appended claims, the singular forms “a”, “an”, and “the” include plural reference unless the context clearly dictates otherwise. Thus, for example, reference to “a plant” includes a plurality of such plants, reference to “a cell” includes one or more cells and equivalents thereof known to those skilled in the art, and so forth.

[0149] As used herein:

[0150] The term “AT-DTP4” generally refers to an Arabidopsis thaliana protein that is encoded by the Arabidopsis thaliana locus At5g62180. The terms “AT-DTP4”, “AT-CXE20”, “AT-carboxyesterase” and “AT-carboxylesterase 20” are used interchangeably herein. “DTP4 polypeptide” refers herein to the AT-DTP4 polypeptide and its homologs or orthologs from other organisms. The terms Zm-DTP4 and Gm-DTP4 refer respectively to Zea mays and Glycine max proteins that are homologous to AT-DTP4.

[0151] The term DTP4 polypeptide as described herein refers to any of the DTP4 polypeptides given in Table 1 and Table 2 in the specification.

[0152] The term DTP4 polypeptide also encompasses a polypeptide wherein the polypeptide gives an E-value score of 1E-15 or less when queried using a Profile Hidden Markov Model prepared using SEQ ID NOS:18, 29, 33, 45, 47, 53, 55, 61, 64, 65, 77, 78, 101, 103, 105, 107, 111, 115, 131, 132, 135, 137, 139, 141, 144, 433, 559 and 604, the query being carried out using the hmmsearch algorithm wherein the Z parameter is set to 1 billion. The term DTP4 polypeptide also refers herein to a polypeptide wherein the polypeptide gives an E-value score of 1E-15 or less when queried using the Profile Hidden Markov Model given in Table 18.

[0153] Nakajima et al (Plant Journal (2006) 46, 880-889) have shown that AT-DTP4 polypeptide sequence has homology to gibberellin receptors, no GA binding capability was detectable in recombinant AT-DTP4 polypeptides.

[0154] Based on phylogenetic analysis, Marshall et al have identified the protein encoded by At5g62180 as a carboxylesterase (CXE). By RT-PCR expression analysis, at-cxe20 was shown to be expressed in almost all Arabidopsis tissues (Marshall et al J Mol Evol (2003) 57:487-500).

[0155] The main feature of carboxylesterases (or carboxyesterases) is the conserved catalytic triad. The active site is made up of a serine (surrounded by the conserved consensus sequence G-X-S-X-G), a glutamate (or less frequently an aspartate), and a histidine (Marshall et al J Mol Evol (2003) 57:487-500). These residues are dispersed throughout the primary amino acid sequence but come together in the tertiary structure to form a charge relay system, creating a nucleophilic serine that can attack the substrate. Another structural motif of importance is the oxyanion hole, which is involved in stabilizing the substrate-enzyme intermediate during hydrolysis. The oxyanion hole is created by three small amino acids: two glycine residues typically located between b-strand 3 and a-helix 1 and the third located immediately following the catalytic serine residue (Marshall et al J Mol Evol (2003) 57:487-500).

[0156] The AT-CXE20 polypeptide has a conserved “nucleophile elbow” (G×S×G) with a unique conformation to activate the nucleophile residue S166, the conserved catalytic triad at S166-H302-D272 and the “oxyanion hole” with the conserved residues G88-G89-G90 for stabilizing the negatively charged transition state.

[0157] Some of these conserved sites and residues are shown in the alignment figures (FIG. 1).

[0158] Esterases that are part of the alpha/beta hydrolase_3 fold (Pfam domain PF07859) form the group of hydrolases that are expected to provide drought tolerance and/or increased yield for crop plants.

[0159] The terms “monocot” and “monocotyledonous plant” are used interchangeably herein. A monocot of the current disclosure includes the Gramineae.

[0160] The terms “dicot” and “dicotyledonous plant” are used interchangeably herein. A dicot of the current disclosure includes the following families: Brassicaceae, Leguminosae, and Solanaceae.

[0161] The terms “full complement” and “full-length complement” are used interchangeably herein, and refer to a complement of a given nucleotide sequence, wherein the complement and the nucleotide sequence consist of the same number of nucleotides and are 100% complementary.

[0162] An “Expressed Sequence Tag” (“EST”) is a DNA sequence derived from a cDNA library and therefore is a sequence which has been transcribed. An EST is typically obtained by a single sequencing pass of a cDNA insert. The sequence of an entire cDNA insert is termed the “Full-Insert Sequence” (“FIS”). A “Contig” sequence is a sequence assembled from two or more sequences that can be selected from, but not limited to, the group consisting of an EST, FIS and PCR sequence. A sequence encoding an entire or functional protein is termed a “Complete Gene Sequence” (“CGS”) and can be derived from an FIS or a contig.

[0163] A “trait” generally refers to a physiological, morphological, biochemical, or physical characteristic of a plant or a particular plant material or cell. In some instances, this characteristic is visible to the human eye, such as seed or plant size, or can be measured by biochemical techniques, such as detecting the protein, starch, or oil content of seed or leaves, or by observation of a metabolic or physiological process, e.g. by measuring tolerance to water deprivation or particular salt or sugar concentrations, or by the observation of the expression level of a gene or genes, or by agricultural observations such as osmotic stress tolerance or yield. The term “trait” is used interchangeably with the term “phenotype” herein.

[0164] “Agronomic characteristic” is a measurable parameter including but not limited to, abiotic stress tolerance, greenness, yield, growth rate, biomass, fresh weight at maturation, dry weight at maturation, fruit yield, seed yield, total plant nitrogen content, fruit nitrogen content, seed nitrogen content, nitrogen content in a vegetative tissue, total plant free amino acid content, fruit free amino acid content, seed free amino acid content, free amino acid content in a vegetative tissue, total plant protein content, fruit protein content, seed protein content, protein content in a vegetative tissue, drought tolerance, nitrogen uptake, root lodging, harvest index, stalk lodging, plant height, ear height, ear length, leaf number, tiller number, growth rate, first pollen shed time, first silk emergence time, anthesis silking interval (ASI), stalk diameter, root architecture, staygreen, relative water content, water use, water use efficiency; dry weight of either main plant, tillers, primary ear, main plant and tillers or cobs; rows of kernels, total plant weight·kernel weight, kernel number, salt tolerance, chlorophyll content, flavonol content, number of yellow leaves, early seedling vigor and seedling emergence under low temperature stress. These agronomic characteristics maybe measured at any stage of the plant development. One or more of these agronomic characteristics may be measured under stress or non-stress conditions, and may show alteration on overexpression of the recombinant constructs disclosed herein.

[0165] “Tiller number” herein refers to the average number of tillers on a plant. A tiller is defined as a secondary shoot that has developed and has a tassel capable of shedding pollen (U.S. Pat. No. 7,723,584).

[0166] Tillers are grain-bearing branches in monocotyledonous plants. The number of tillers per plant is a key factor that determines yield in the many major cereal crops, such as rice and wheat, therefore by increasing tiller number, there is a potential for increasing the yield of major cereal crops like rice, wheat, and barley.

[0167] Abiotic stress may be at least one condition selected from the group consisting of: drought, water deprivation, flood, high light intensity, high temperature, low temperature, salinity, etiolation, defoliation, heavy metal toxicity, anaerobiosis, nutrient deficiency, nutrient excess, UV irradiation, atmospheric pollution (e.g., ozone) and exposure to chemicals (e.g., paraquat) that induce production of reactive oxygen species (ROS).

[0168] “Increased stress tolerance” of a plant is measured relative to a reference or control plant, and is a trait of the plant to survive under stress conditions over prolonged periods of time, without exhibiting the same degree of physiological or physical deterioration relative to the reference or control plant grown under similar stress conditions.

[0169] A plant with “increased stress tolerance” can exhibit increased tolerance to one or more different stress conditions.

[0170] “Stress tolerance activity” of a polypeptide indicates that over-expression of the polypeptide in a transgenic plant confers increased stress tolerance to the transgenic plant relative to a reference or control plant.

[0171] A polypeptide with a certain activity, such as a polypeptide with one or more than one activity selected from the group consisting of: increased triple stress tolerance, increased drought stress tolerance, increased nitrogen stress tolerance, increased osmotic stress tolerance, altered ABA response, altered root architecture, increased tiller number; indicates that overexpression of the polypeptide in a plant confers the corresponding phenotype to the plant relative to a reference or control plant. For example, a plant overexpressing a polypeptide with “altered ABA response activity”, would exhibit the phenotype of “altered ABA response”, when compared to a control or reference plant.

[0172] Increased biomass can be measured, for example, as an increase in plant height, plant total leaf area, plant fresh weight, plant dry weight or plant seed yield, as compared with control plants.

[0173] The ability to increase the biomass or size of a plant would have several important commercial applications. Crop species may be generated that produce larger cultivars, generating higher yield in, for example, plants in which the vegetative portion of the plant is useful as food, biofuel or both.

[0174] Increased leaf size may be of particular interest. Increasing leaf biomass can be used to increase production of plant-derived pharmaceutical or industrial products. An increase in total plant photosynthesis is typically achieved by increasing leaf area of the plant. Additional photosynthetic capacity may be used to increase the yield derived from particular plant tissue, including the leaves, roots, fruits or seed, or permit the growth of a plant under decreased light intensity or under high light intensity.

[0175] Modification of the biomass of another tissue, such as root tissue, may be useful to improve a plants ability to grow under harsh environmental conditions, including drought or nutrient deprivation, because larger roots may better reach water or nutrients or take up water or nutrients.

[0176] For some ornamental plants, the ability to provide larger varieties would be highly desirable. For many plants, including fruit-bearing trees, trees that are used for lumber production, or trees and shrubs that serve as view or wind screens, increased stature provides improved benefits in the forms of greater yield or improved screening.

[0177] The growth and emergence of maize silks has a considerable importance in the determination of yield under drought (Fuad-Hassan et al. 2008 Plant Cell Environ. 31:1349-1360). When soil water deficit occurs before flowering, silk emergence out of the husks is delayed while anthesis is largely unaffected, resulting in an increased anthesis-silking interval (ASI) (Edmeades et al. 2000 Physiology and Modeling Kernel set in Maize (eds M. E. Westgate & K. Boote; CSSA (Crop Science Society of America) Special Publication No. 29. Madison, Wis.: CSSA, 43-73). Selection for reduced ASI has been used successfully to increase drought tolerance of maize (Edmeades et al. 1993 Crop Science 33: 1029-1035; Bolanos & Edmeades 1996 Field Crops Research 48:65-80; Bruce et al. 2002 J. Exp. Botany 53:13-25).

[0178] Terms used herein to describe thermal time include “growing degree days” (GDD), “growing degree units” (GDU) and “heat units” (HU).

[0179] “Transgenic” generally refers to any cell, cell line, callus, tissue, plant part or plant, the genome of which has been altered by the presence of a heterologous nucleic acid, such as a recombinant DNA construct, including those initial transgenic events as well as those created by sexual crosses or asexual propagation from the initial transgenic event. The term “transgenic” as used herein does not encompass the alteration of the genome (chromosomal or extra-chromosomal) by conventional plant breeding methods or by naturally occurring events such as random cross-fertilization, non-recombinant viral infection, non-recombinant bacterial transformation, non-recombinant transposition, or spontaneous mutation.

[0180] “Genome” as it applies to plant cells encompasses not only chromosomal DNA found within the nucleus, but organelle DNA found within subcellular components (e.g., mitochondrial, plastid) of the cell.

[0181] “Plant” includes reference to whole plants, plant organs, plant tissues, plant propagules, seeds and plant cells and progeny of same. Plant cells include, without limitation, cells from seeds, suspension cultures, embryos, meristematic regions, callus tissue, leaves, roots, shoots, gametophytes, sporophytes, pollen, and microspores.

[0182] “Propagule” includes all products of meiosis and mitosis able to propagate a new plant, including but not limited to, seeds, spores and parts of a plant that serve as a means of vegetative reproduction, such as corms, tubers, offsets, or runners. Propagule also includes grafts where one portion of a plant is grafted to another portion of a different plant (even one of a different species) to create a living organism. Propagule also includes all plants and seeds produced by cloning or by bringing together meiotic products, or allowing meiotic products to come together to form an embryo or fertilized egg (naturally or with human intervention).

[0183] “Progeny” comprises any subsequent generation of a plant.

[0184] “Transgenic plant” includes reference to a plant which comprises within its genome a heterologous polynucleotide. For example, the heterologous polynucleotide is stably integrated within the genome such that the polynucleotide is passed on to successive generations. The heterologous polynucleotide may be integrated into the genome alone or as part of a recombinant DNA construct.

[0185] The commercial development of genetically improved germplasm has also advanced to the stage of introducing multiple traits into crop plants, often referred to as a gene stacking approach. In this approach, multiple genes conferring different characteristics of interest can be introduced into a plant. Gene stacking can be accomplished by many means including but not limited to co-transformation, retransformation, and crossing lines with different transgenes.

[0186] “Transgenic plant” also includes reference to plants which comprise more than one heterologous polynucleotide within their genome. Each heterologous polynucleotide may confer a different trait to the transgenic plant.

[0187] “Heterologous” with respect to sequence means a sequence that originates from a foreign species, or, if from the same species, is substantially modified from its native form in composition and/or genomic locus by deliberate human intervention.

[0188] “Polynucleotide”, “nucleic acid sequence”, “nucleotide sequence”, or “nucleic acid fragment” are used interchangeably and is a polymer of RNA or DNA that is single- or double-stranded, optionally containing synthetic, non-natural or altered nucleotide bases. Nucleotides (usually found in their 5′-monophosphate form) are referred to by their single letter designation as follows: “A” for adenylate or deoxyadenylate (for RNA or DNA, respectively), “C” for cytidylate or deoxycytidylate, “G” for guanylate or deoxyguanylate, “U” for uridylate, “T” for deoxythymidylate, “R” for purines (A or G), “Y” for pyrimidines (C or T), “K” for G or T, “H” for A or C or T, “I” for inosine, and “N” for any nucleotide.

[0189] “Polypeptide”, “peptide”, “amino acid sequence” and “protein” are used interchangeably herein to refer to a polymer of amino acid residues. The terms apply to amino acid polymers in which one or more amino acid residue is an artificial chemical analogue of a corresponding naturally occurring amino acid, as well as to naturally occurring amino acid polymers. The terms “polypeptide”, “peptide”, “amino acid sequence”, and “protein” are also inclusive of modifications including, but not limited to, glycosylation, lipid attachment, sulfation, gamma-carboxylation of glutamic acid residues, hydroxylation and ADP-ribosylation.

[0190] “Messenger RNA (mRNA)” generally refers to the RNA that is without introns and that can be translated into protein by the cell.

[0191] “cDNA” generally refers to a DNA that is complementary to and synthesized from a mRNA template using the enzyme reverse transcriptase. The cDNA can be single-stranded or converted into the double-stranded form using the Klenow fragment of DNA polymerase I.

[0192] “Coding region” generally refers to the portion of a messenger RNA (or the corresponding portion of another nucleic acid molecule such as a DNA molecule) which encodes a protein or polypeptide. “Non-coding region” generally refers to all portions of a messenger RNA or other nucleic acid molecule that are not a coding region, including but not limited to, for example, the promoter region, 5′ untranslated region (“UTR”), 3′ UTR, intron and terminator. The terms “coding region” and “coding sequence” are used interchangeably herein. The terms “non-coding region” and “non-coding sequence” are used interchangeably herein.

[0193] “Mature” protein generally refers to a post-translationally processed polypeptide; i.e., one from which any pre- or pro-peptides present in the primary translation product have been removed.

[0194] “Precursor” protein generally refers to the primary product of translation of mRNA; i.e., with pre- and pro-peptides still present. Pre- and pro-peptides may be and are not limited to intracellular localization signals.

[0195] “Isolated” generally refers to materials, such as nucleic acid molecules and/or proteins, which are substantially free or otherwise removed from components that normally accompany or interact with the materials in a naturally occurring environment. Isolated polynucleotides may be purified from a host cell in which they naturally occur. Conventional nucleic acid purification methods known to skilled artisans may be used to obtain isolated polynucleotides. The term also embraces recombinant polynucleotides and chemically synthesized polynucleotides.

[0196] As used herein the terms non-genomic nucleic acid sequence or non-genomic nucleic acid molecule generally refer to a nucleic acid molecule that has one or more change in the nucleic acid sequence compared to a native or genomic nucleic acid sequence. In some embodiments the change to a native or genomic nucleic acid molecule includes but is not limited to: changes in the nucleic acid sequence due to the degeneracy of the genetic code; codon optimization of the nucleic acid sequence for expression in plants; changes in the nucleic acid sequence to introduce at least one amino acid substitution, insertion, deletion and/or addition compared to the native or genomic sequence; removal of one or more intron associated with a genomic nucleic acid sequence; insertion of one or more heterologous introns; deletion of one or more upstream or downstream regulatory regions associated with a genomic nucleic acid sequence; insertion of one or more heterologous upstream or downstream regulatory regions; deletion of the 5′ and/or 3′ untranslated region associated with a genomic nucleic acid sequence; and insertion of a heterologous 5′ and/or 3′ untranslated region.

[0197] “Recombinant” generally refers to an artificial combination of two otherwise separated segments of sequence, e.g., by chemical synthesis or by the manipulation of isolated segments of nucleic acids by genetic engineering techniques. “Recombinant” also includes reference to a cell or vector, that has been modified by the introduction of a heterologous nucleic acid or a cell derived from a cell so modified, but does not encompass the alteration of the cell or vector by naturally occurring events (e.g., spontaneous mutation, natural transformation/transduction/transposition) such as those occurring without deliberate human intervention.

[0198] “Recombinant DNA construct” generally refers to a combination of nucleic acid fragments that are not normally found together in nature. Accordingly, a recombinant DNA construct may comprise regulatory sequences and coding sequences that are derived from different sources, or regulatory sequences and coding sequences derived from the same source, but arranged in a manner different than that normally found in nature. The terms “recombinant DNA construct” and “recombinant construct” are used interchangeably herein.

[0199] The terms “entry clone” and “entry vector” are used interchangeably herein.

[0200] “Regulatory sequences” refer to nucleotide sequences located upstream (5′ non-coding sequences), within, or downstream (3′ non-coding sequences) of a coding sequence, and which influence the transcription, RNA processing or stability, or translation of the associated coding sequence. Regulatory sequences may include, but are not limited to, promoters, translation leader sequences, introns, and polyadenylation recognition sequences. The terms “regulatory sequence” and “regulatory element” are used interchangeably herein.

[0201] “Promoter” generally refers to a nucleic acid fragment capable of controlling transcription of another nucleic acid fragment.

[0202] “Promoter functional in a plant” is a promoter capable of controlling transcription in plant cells whether or not its origin is from a plant cell.

[0203] “Tissue-specific promoter” and “tissue-preferred promoter” are used interchangeably, and refer to a promoter that is expressed predominantly but not necessarily exclusively in one tissue or organ, but that may also be expressed in one specific cell.

[0204] “Developmentally regulated promoter” generally refers to a promoter whose activity is determined by developmental events.

[0205] “Operably linked” generally refers to the association of nucleic acid fragments in a single fragment so that the function of one is regulated by the other. For example, a promoter is operably linked with a nucleic acid fragment when it is capable of regulating the transcription of that nucleic acid fragment.

[0206] “Expression” generally refers to the production of a functional product. For example, expression of a nucleic acid fragment may refer to transcription of the nucleic acid fragment (e.g., transcription resulting in mRNA or functional RNA) and/or translation of mRNA into a precursor or mature protein.

[0207] “Phenotype” means the detectable characteristics of a cell or organism.

[0208] “Introduced” in the context of inserting a nucleic acid fragment (e.g., a recombinant DNA construct) into a cell, means “transfection” or “transformation” or “transduction” and includes reference to the incorporation of a nucleic acid fragment into a eukaryotic or prokaryotic cell where the nucleic acid fragment may be incorporated into the genome of the cell (e.g., chromosome, plasmid, plastid or mitochondrial DNA), converted into an autonomous replicon, or transiently expressed (e.g., transfected mRNA).

[0209] A “transformed cell” is any cell into which a nucleic acid fragment (e.g., a recombinant DNA construct) has been introduced.

[0210] “Transformation” as used herein generally refers to both stable transformation and transient transformation.

[0211] “Stable transformation” generally refers to the introduction of a nucleic acid fragment into a genome of a host organism resulting in genetically stable inheritance. Once stably transformed, the nucleic acid fragment is stably integrated in the genome of the host organism and any subsequent generation.

[0212] “Transient transformation” generally refers to the introduction of a nucleic acid fragment into the nucleus, or DNA-containing organelle, of a host organism resulting in gene expression without genetically stable inheritance.

[0213] “Allele” is one of several alternative forms of a gene occupying a given locus on a chromosome. When the alleles present at a given locus on a pair of homologous chromosomes in a diploid plant are the same that plant is homozygous at that locus. If the alleles present at a given locus on a pair of homologous chromosomes in a diploid plant differ that plant is heterozygous at that locus. If a transgene is present on one of a pair of homologous chromosomes in a diploid plant that plant is hemizygous at that locus.

[0214] A “chloroplast transit peptide” is an amino acid sequence which is translated in conjunction with a protein and directs the protein to the chloroplast or other plastid types present in the cell in which the protein is made (Lee et al. (2008) Plant Cell 20:1603-1622). The terms “chloroplast transit peptide” and “plastid transit peptide” are used interchangeably herein. “Chloroplast transit sequence” generally refers to a nucleotide sequence that encodes a chloroplast transit peptide. A “signal peptide” is an amino acid sequence which is translated in conjunction with a protein and directs the protein to the secretory system (Chrispeels (1991) Ann. Rev. Plant Phys. Plant Mol. Biol. 42:21-53). If the protein is to be directed to a vacuole, a vacuolar targeting signal (supra) can further be added, or if to the endoplasmic reticulum, an endoplasmic reticulum retention signal (supra) may be added. If the protein is to be directed to the nucleus, any signal peptide present should be removed and instead a nuclear localization signal included (Raikhel (1992) Plant Phys. 100:1627-1632). A “mitochondrial signal peptide” is an amino acid sequence which directs a precursor protein into the mitochondria (Zhang and Glaser (2002) Trends Plant Sci 7:14-21).

[0215] Sequence alignments and percent identity calculations may be determined using a variety of comparison methods designed to detect homologous sequences including, but not limited to, the Megalign® program of the LASERGENE® bioinformatics computing suite (DNASTAR® Inc., Madison, Wis.). Unless stated otherwise, multiple alignment of the sequences provided herein were performed using the Clustal V method of alignment (Higgins and Sharp (1989) CABIOS. 5:151-153) with the default parameters (GAP PENALTY=10, GAP LENGTH PENALTY=10). Default parameters for pairwise alignments and calculation of percent identity of protein sequences using the Clustal V method are KTUPLE=1, GAP PENALTY=3, WINDOW=5 and DIAGONALS SAVED=5. For nucleic acids these parameters are KTUPLE=2, GAP PENALTY=5, WINDOW=4 and DIAGONALS SAVED=4. After alignment of the sequences, using the Clustal V program, it is possible to obtain “percent identity” and “divergence” values by viewing the “sequence distances” table on the same program; unless stated otherwise, percent identities and divergences provided and claimed herein were calculated in this manner.

[0216] Alternatively, the Clustal W method of alignment may be used. The Clustal W method of alignment (described by Higgins and Sharp, CABIOS. 5:151-153 (1989); Higgins, D. G. et al., Comput. Appl. Biosci. 8:189-191 (1992)) can be found in the MegAlign™ v6.1 program of the LASERGENE® bioinformatics computing suite (DNASTAR® Inc., Madison, Wis.). Default parameters for multiple alignment correspond to GAP PENALTY=10, GAP LENGTH PENALTY=0.2, Delay Divergent Sequences=30%, DNA Transition Weight=0.5, Protein Weight Matrix=Gonnet Series, DNA Weight Matrix=IUB. For pairwise alignments the default parameters are Alignment=Slow-Accurate, Gap Penalty=10.0, Gap Length=0.10, Protein Weight Matrix=Gonnet 250 and DNA Weight Matrix=IUB. After alignment of the sequences using the Clustal W program, it is possible to obtain “percent identity” and “divergence” values by viewing the “sequence distances” table in the same program.

[0217] Standard recombinant DNA and molecular cloning techniques used herein are well known in the art and are described more fully in Sambrook, J., Fritsch, E. F. and Maniatis, T. Molecular Cloning: A Laboratory Manual; Cold Spring Harbor Laboratory Press: Cold Spring Harbor, 1989 (hereinafter “Sambrook”).

[0218] Complete sequences and figures for vectors described herein (e.g., pHSbarENDs2, pDONRM/Zeo, pDONRM221, pBC-yellow, PHP27840, PHP23236, PHP10523, PHP23235 and PHP28647) are given in PCT Publication No. WO/2012/058528, the contents of which are herein incorporated by reference.

[0219] Turning now to the embodiments:

[0220] Embodiments include isolated polynucleotides and polypeptides, recombinant DNA constructs useful for conferring drought tolerance, compositions (such as plants or seeds) comprising these recombinant DNA constructs, and methods utilizing these recombinant DNA constructs.

[0221] Isolated Polynucleotides and Polypeptides:

[0222] The present disclosure includes the following isolated polynucleotides and polypeptides:

[0223] An isolated polynucleotide comprising: (i) a nucleic acid sequence encoding a polypeptide having an amino acid sequence of at least 50%, 51%, 52%, 53%, 54%, 55%, 56%, 57%, 58%, 59%, 60%, 61%, 62%, 63%, 64%, 65%, 66%, 67%, 68%, 69%, 70%, 71%, 72%, 73%, 74%, 75%, 76%, 77%, 78%, 79%, 80%, 81%, 82%, 83%, 84%, 85%, 86%, 87%, 88%, 89%, 90%, 91%, 92%, 93%, 94%, 95%, 96%, 97%, 98%, 99%, or 100% sequence identity, based on the Clustal V or Clustal W method of alignment, when compared to SEQ ID NO:18, 39, 43, 45, 47, 49, 51, 55, 59, 61, 64, 65, 66, 95, 97, 101, 103, 107, 111, 113, 117, 119, 121, 123, 127, 129, 130, 131, 132, 135, 627 or 628, and combinations thereof; or (ii) a full complement of the nucleic acid sequence of (i), wherein the full complement and the nucleic acid sequence of (i) consist of the same number of nucleotides and are 100% complementary. Any of the foregoing isolated polynucleotides may be utilized in any recombinant DNA constructs (including suppression DNA constructs) of the present disclosure. The polypeptide is preferably a DTP4 polypeptide. The polypeptide preferably has stress tolerance activity, wherein the stress is selected from the group consisting of drought stress, triple stress, osmotic stress and nitrogen stress. The polypeptide may also have at least one activity selected from the group consisting of: carboxylesterase, increased triple stress tolerance, increased drought stress tolerance, increased nitrogen stress tolerance, increased osmotic stress tolerance, altered ABA response, altered root architecture, increased tiller number.

[0224] An isolated polypeptide having an amino acid sequence of at least 50%, 51%, 52%, 53%, 54%, 55%, 56%, 57%, 58%, 59%, 60%, 61%, 62%, 63%, 64%, 65%, 66%, 67%, 68%, 69%, 70%, 71%, 72%, 73%, 74%, 75%, 76%, 77%, 78%, 79%, 80%, 81%, 82%, 83%, 84%, 85%, 86%, 87%, 88%, 89%, 90%, 91%, 92%, 93%, 94%, 95%, 96%, 97%, 98%, 99%, or 100% sequence identity, based on the Clustal V or Clustal W method of alignment, when compared to SEQ ID NO:18, 39, 43, 45, 47, 49, 51,55, 59, 61,64, 65, 66, 95, 97, 101, 103, 107, 111, 113, 117, 119, 121, 123, 127, 129, 130, 131, 132, 135, 627 or 628, and combinations thereof. The polypeptide is preferably a DTP4 polypeptide. The polypeptide preferably has stress tolerance activity, wherein the stress is selected from the group consisting of drought stress, triple stress, nitrogen stress and osmotic stress. The polypeptide may also have at least one activity selected from the group consisting of carboxylesterase, increased triple stress tolerance, increased drought stress tolerance, increased nitrogen stress tolerance, increased osmotic stress tolerance, altered ABA response, altered root architecture, increased tiller number.

[0225] An isolated polynucleotide comprising (i) a nucleic acid sequence of at least 50%, 51%, 52%, 53%, 54%, 55%, 56%, 57%, 58%, 59%, 60%, 61%, 62%, 63%, 64%, 65%, 66%, 67%, 68%, 69%, 70%, 71%, 72%, 73%, 74%, 75%, 76%, 77%, 78%, 79%, 80%, 81%, 82%, 83%, 84%, 85%, 86%, 87%, 88%, 89%, 90%, 91%, 92%, 93%, 94%, 95%, 96%, 97%, 98%, 99%, or 100% sequence identity, based on the Clustal V or Clustal W method of alignment, when compared to SEQ ID NO:16, 17, 19, 38, 42, 44, 46, 48, 50, 54, 58, 60, 62, 63, 94, 96, 100, 102, 106, 110, 112, 116, 118, 120 or 122, and combinations thereof; or (ii) a full complement of the nucleic acid sequence of (i). Any of the foregoing isolated polynucleotides may be utilized in any recombinant DNA constructs (including suppression DNA constructs) of the present disclosure. The isolated polynucleotide preferably encodes a DTP4 polypeptide. The polypeptide preferably has stress tolerance activity, wherein the stress is selected from the group consisting of drought stress, triple stress, osmotic stress and nitrogen stress. The polypeptide may also have at least one activity selected from the group consisting of: carboxylesterase, increased triple stress tolerance, increased drought stress tolerance, increased nitrogen stress tolerance, increased osmotic stress tolerance, altered ABA response, altered root architecture, increased tiller number.

[0226] An isolated polynucleotide comprising a nucleotide sequence, wherein the nucleotide sequence is hybridizable under stringent conditions with a DNA molecule comprising the full complement of SEQ ID NO:16, 17, 19, 38, 42, 44, 46, 48, 50, 54, 58, 60, 62, 63, 94, 96, 100, 102, 106, 110, 112, 116, 118, 120 or 122. The isolated polynucleotide preferably encodes a DTP4 polypeptide. The polypeptide preferably has stress tolerance activity, wherein the stress is selected from the group consisting of drought stress, triple stress, osmotic stress and nitrogen stress.

[0227] An isolated polynucleotide comprising a nucleotide sequence, wherein the nucleotide sequence is derived from SEQ ID NO:16, 17, 19, 38, 42, 44, 46, 48, 50, 54, 58, 60, 62, 63, 94, 96, 100, 102, 106, 110, 112, 116, 118, 120 or 122 by alteration of one or more nucleotides by at least one method selected from the group consisting of: deletion, substitution, addition and insertion. The isolated polynucleotide preferably encodes a DTP4 polypeptide. The polypeptide preferably has stress tolerance activity, wherein the stress is selected from the group consisting of drought stress, triple stress, osmotic stress and nitrogen stress. The polypeptide may also have at least one activity selected from the group consisting of: carboxylesterase, increased triple stress tolerance, increased drought stress tolerance, increased nitrogen stress tolerance, increased osmotic stress tolerance, altered ABA response, altered root architecture, increased tiller number.

[0228] An isolated polynucleotide comprising a nucleotide sequence, wherein the nucleotide sequence corresponds to an allele of SEQ ID NO:16, 17, 19, 38, 42, 44, 46, 48, 50, 54, 58, 60, 62, 63, 94, 96, 100, 102, 106, 110, 112, 116, 118, 120 or 122.

[0229] In any of the preceding embodiments, the DTP4 polypeptide can be any of the DTP4 polypeptide given in Table 1 and Table 2.

[0230] In any of the preceding embodiments, the DTP4 polypeptide may be encoded by any of the nucleotide sequences given in Table 1 and Table 2.

[0231] It is understood, as those skilled in the art will appreciate, that the disclosure encompasses more than the specific exemplary sequences. Alterations in a nucleic acid fragment which result in the production of a chemically equivalent amino acid at a given site, but do not affect the functional properties of the encoded polypeptide, are well known in the art. For example, a codon for the amino acid alanine, a hydrophobic amino acid, may be substituted by a codon encoding another less hydrophobic residue, such as glycine, or a more hydrophobic residue, such as valine, leucine, or isoleucine. Similarly, changes which result in substitution of one negatively charged residue for another, such as aspartic acid for glutamic acid, or one positively charged residue for another, such as lysine for arginine, can also be expected to produce a functionally equivalent product. Nucleotide changes which result in alteration of the N-terminal and C-terminal portions of the polypeptide molecule would also not be expected to alter the activity of the polypeptide. Each of the proposed modifications is well within the routine skill in the art, as is determination of retention of biological activity of the encoded products.

[0232] The protein of the current disclosure may also be a protein which comprises an amino acid sequence comprising deletion, substitution, insertion and/or addition of one or more amino acids in an amino acid sequence presented in SEQ ID NO:18, 39, 43, 45, 47, 49, 51, 55, 59, 61, 64, 65, 66, 95, 97, 101, 103, 107, 111, 113, 117, 119, 121,123, 127, 129, 130, 131,132, 135, 627 or 628. The substitution may be conservative, which means the replacement of a certain amino acid residue by another residue having similar physical and chemical characteristics. Non-limiting examples of conservative substitution include replacement between aliphatic group-containing amino acid residues such as lie, Val, Leu or Ala, and replacement between polar residues such as Lys-Arg, Glu-Asp or Gln-Asn replacement.

[0233] Proteins derived by amino acid deletion, substitution, insertion and/or addition can be prepared when DNAs encoding their wild-type proteins are subjected to, for example, well-known site-directed mutagenesis (see, e.g., Nucleic Acid Research, Vol. 10, No. 20, p. 6487-6500, 1982, which is hereby incorporated by reference in its entirety). As used herein, the term “one or more amino acids” is intended to mean a possible number of amino acids which may be deleted, substituted, inserted and/or added by site-directed mutagenesis.

[0234] Site-directed mutagenesis may be accomplished, for example, as follows using a synthetic oligonucleotide primer that is complementary to single-stranded phage DNA to be mutated, except for having a specific mismatch (i.e., a desired mutation). Namely, the above synthetic oligonucleotide is used as a primer to cause synthesis of a complementary strand by phages, and the resulting duplex DNA is then used to transform host cells. The transformed bacterial culture is plated on agar, whereby plaques are allowed to form from phage-containing single cells. As a result, in theory, 50% of new colonies contain phages with the mutation as a single strand, while the remaining 50% have the original sequence. At a temperature which allows hybridization with DNA completely identical to one having the above desired mutation, but not with DNA having the original strand, the resulting plaques are allowed to hybridize with a synthetic probe labeled by kinase treatment. Subsequently, plaques hybridized with the probe are picked up and cultured for collection of their DNA.

[0235] Techniques for allowing deletion, substitution, insertion and/or addition of one or more amino acids in the amino acid sequences of biologically active peptides such as enzymes while retaining their activity include site-directed mutagenesis mentioned above, as well as other techniques such as those for treating a gene with a mutagen, and those in which a gene is selectively cleaved to remove, substitute, insert or add a selected nucleotide or nucleotides, and then ligated.

[0236] The protein of the present disclosure may also be a protein which is encoded by a nucleic acid comprising a nucleotide sequence comprising deletion, substitution, insertion and/or addition of one or more nucleotides in the nucleotide sequence of SEQ ID NO:16, 17, 19, 38, 42, 44, 46, 48, 50, 54, 58, 60, 62, 63, 94, 96, 100, 102, 106, 110, 112, 116, 118, 120 or 122. Nucleotide deletion, substitution, insertion and/or addition may be accomplished by site-directed mutagenesis or other techniques as mentioned above.

[0237] The protein of the present disclosure may also be a protein which is encoded by a nucleic acid comprising a nucleotide sequence hybridizable under stringent conditions with the complementary strand of the nucleotide sequence of SEQ ID NO:16, 17, 19, 38, 42, 44, 46, 48, 50, 54, 58, 60, 62, 63, 94, 96, 100, 102, 106, 110, 112, 116, 118, 120 or 122.

[0238] The term “under stringent conditions” means that two sequences hybridize under moderately or highly stringent conditions. More specifically, moderately stringent conditions can be readily determined by those having ordinary skill in the art, e.g., depending on the length of DNA. The basic conditions are set forth by Sambrook et al., Molecular Cloning: A Laboratory Manual, third edition, chapters 6 and 7, Cold Spring Harbor Laboratory Press, 2001 and include the use of a prewashing solution for nitrocellulose filters 5×SSC, 0.5% SDS, 1.0 mM EDTA (pH 8.0), hybridization conditions of about 50% formamide, 2×SSC to 6×SSC at about 40-50° C. (or other similar hybridization solutions, such as Stark's solution, in about 50% formamide at about 42° C.) and washing conditions of, for example, about 40-60° C., 0.5-6×SSC, 0.1% SDS. Preferably, moderately stringent conditions include hybridization (and washing) at about 50° C. and 6×SSC. Highly stringent conditions can also be readily determined by those skilled in the art, e.g., depending on the length of DNA.

[0239] Generally, such conditions include hybridization and/or washing at higher temperature and/or lower salt concentration (such as hybridization at about 65° C., 6×SSC to 0.2×SSC, preferably 6×SSC, more preferably 2×SSC, most preferably 0.2×SSC), compared to the moderately stringent conditions. For example, highly stringent conditions may include hybridization as defined above, and washing at approximately 65-68° C., 0.2×SSC, 0.1% SDS. SSPE (1×SSPE is 0.15 M NaCl, 10 mM NaH2PO4, and 1.25 mM EDTA, pH 7.4) can be substituted for SSC (1×SSC is 0.15 M NaCl and 15 mM sodium citrate) in the hybridization and washing buffers; washing is performed for 15 minutes after hybridization is completed.

[0240] It is also possible to use a commercially available hybridization kit which uses no radioactive substance as a probe. Specific examples include hybridization with an ECL direct labeling & detection system (Amersham). Stringent conditions include, for example, hybridization at 42° C. for 4 hours using the hybridization buffer included in the kit, which is supplemented with 5% (w/v) Blocking reagent and 0.5 M NaCl, and washing twice in 0.4% SDS, 0.5×SSC at 55° C. for 20 minutes and once in 2×SSC at room temperature for 5 minutes.

[0241] DTP4 polypeptides included in the current disclosure are also those that have an E-value score of 1E-15 or less when queried using a Profile Hidden Markov Model (Profile HMM) prepared using SEQ ID NOS:18, 29, 33, 45, 47, 53, 55, 61,64, 65, 77, 78, 101, 103, 105, 107, 111, 115, 131, 132, 135, 137, 139, 141, 144, 433, 559 and 604; the query being carried out using the hmmsearch algorithm wherein the Z parameter is set to 1 billion.

[0242] In one embodiment, the E-value score can be 1E-15, 1E-25, 1E-35, 1E-45, 1E-55, 1E-65, 1E-70, 1E-75, 1E-80 or 1E-85.

[0243] The terms “Profile HMMs” or “HMM profile” are used interchangeably herein as used herein are statistical models of multiple sequence alignments, or even of single sequences. They capture position-specific information about how conserved each column of the alignment is, and which residues are likely (Krogh et al., 1994, J. Mol. Biol., 235:1501-1531; Eddy, 1998, Curr. Opin. Struct. Biol., 6:361-365.; Durbin et al., Probabilistic Models of Proteins and Nucleic Acids. Cambridge University Press, Cambridge UK. (1998); Eddy, Sean R., March 2010, HMMER User's Guide Version 3.0, Howard Hughes Medical Institute, Janelia Farm Research Campus, Ashburn Va., USA; US patent publication No. US20100293118; U.S. Pat. No. 8,623,623).

[0244] The term “E-value” or “Expect value (E)” is a parameter which provides the probability that a match will occur by chance. It provides the statistical significance of the match to a sequence. The lower the E-value, the more significant the hit. It decreases exponentially as the Score (S) of the match increases.

[0245] The Z parameter refers to the ability to set the database size, for purposes of E-value calculation (Eddy, Sean R., March 2010, HMMER User's Guide Version 3.0, Howard Hughes Medical Institute, Janelia Farm Research Campus, Ashburn Va., USA).

[0246] Recombinant DNA Constructs and Suppression DNA Constructs:

[0247] In one embodiment, the present disclosure includes recombinant DNA constructs (including suppression DNA constructs).

[0248] In one embodiment, a recombinant DNA construct comprises a polynucleotide operably linked to at least one heterologous regulatory sequence (e.g., a promoter functional in a plant), wherein the polynucleotide comprises (i) a nucleic acid sequence encoding an amino acid sequence of at least 50%, 51%, 52%, 53%, 54%, 55%, 56%, 57%, 58%, 59%, 60%, 61%, 62%, 63%, 64%, 65%, 66%, 67%, 68%, 69%, 70%, 71%, 72%, 73%, 74%, 75%, 76%, 77%, 78%, 79%, 80%, 81%, 82%, 83%, 84%, 85%, 86%, 87%, 88%, 89%, 90%, 91%, 92%, 93%, 94%, 95%, 96%, 97%, 98%, 99%, or 100% sequence identity, based on the Clustal V or Clustal W method of alignment, when compared to SEQ ID NO:18, 39, 43, 45, 47, 49, 51, 55, 59, 61, 64, 65, 66, 95, 97, 101, 103, 107, 111, 113, 117, 119, 121, 123, 127, 129, 130, 131, 132, 135, 627 or 628, and combinations thereof; or (ii) a full complement of the nucleic acid sequence of (i). The polypeptide may have at least one activity selected from the group consisting of carboxylesterase, increased triple stress tolerance, increased drought stress tolerance, increased nitrogen stress tolerance, increased osmotic stress tolerance, altered ABA response, altered root architecture, increased tiller number,

[0249] In another embodiment, a recombinant DNA construct comprises a polynucleotide operably linked to at least one heterologous regulatory sequence (e.g., a promoter functional in a plant), wherein said polynucleotide comprises (i) a nucleic acid sequence of at least 50%, 51%, 52%, 53%, 54%, 55%, 56%, 57%, 58%, 59%, 60%, 61%, 62%, 63%, 64%, 65%, 66%, 67%, 68%, 69%, 70%, 71%, 72%, 73%, 74%, 75%, 76%, 77%, 78%, 79%, 80%, 81%, 82%, 83%, 84%, 85%, 86%, 87%, 88%, 89%, 90%, 91%, 92%, 93%, 94%, 95%, 96%, 97%, 98%, 99%, or 100% sequence identity, based on the Clustal V or Clustal W method of alignment, when compared to SEQ ID NO:16, 17, 19, 38, 42, 44, 46, 48, 50, 54, 58, 60, 62, 63, 94, 96, 100, 102, 106, 110, 112, 116, 118, 120 or 122, and combinations thereof; or (ii) a full complement of the nucleic acid sequence of (i).

[0250] In another embodiment, a recombinant DNA construct comprises a polynucleotide operably linked to at least one heterologous regulatory sequence (e.g., a promoter functional in a plant), wherein said polynucleotide encodes a DTP4 polypeptide. The DTP4 polypeptide preferably has stress tolerance activity, wherein the stress is selected from the group consisting of drought stress, triple stress, osmotic stress and nitrogen stress. The polypeptide may have at least one activity selected from the group consisting of carboxylesterase, increased triple stress tolerance, increased drought stress tolerance, increased nitrogen stress tolerance, increased osmotic stress tolerance, altered ABA response, altered root architecture, increased tiller number,

[0251] In any of the embodiments given herein, the DTP4 polypeptide may be selected from any of the polypeptides listed in Table 1 and Table 2.

[0252] The DTP4 polypeptide may be from Arabidopsis thaliana, Zea mays, Glycine max, Glycine tabacina, Glycine soja, Glycine tomentella, Oryza sativa, Brassica napus, Sorghum bicolor, Saccharum officinarum, Triticum aestivum, or any of the plant species disclosed herein.

[0253] In one embodiment, a recombinant construct comprises a polynucleotide, wherein the polynucleotide is operably linked to a heterologous promoter, and encodes a polypeptide with at least one activity selected from the group consisting of: carboxylesterase, increased triple stress tolerance, increased drought stress tolerance, increased nitrogen stress tolerance, increased osmotic stress tolerance, altered ABA response, altered root architecture, increased tiller number, wherein the polypeptide gives an E-value score of 1E-15 or less when queried using a Profile Hidden Markov Model prepared using SEQ ID NOS:18, 29, 33, 45, 47, 53, 55, 61, 64, 65, 77, 78, 101, 103, 105, 107, 111, 115, 131, 132, 135, 137, 139, 141, 144, 433, 559 and 604, the query being carried out using the hmmsearch algorithm wherein the Z parameter is set to 1 billion.

[0254] In another aspect, the present disclosure includes suppression DNA constructs.

[0255] A suppression DNA construct may comprise at least one heterologous regulatory sequence (e.g., a promoter functional in a plant) operably linked to (a) all or part of: (i) a nucleic acid sequence encoding a polypeptide having an amino acid sequence of at least 50%, 51%, 52%, 53%, 54%, 55%, 56%, 57%, 58%, 59%, 60%, 61%, 62%, 63%, 64%, 65%, 66%, 67%, 68%, 69%, 70%, 71%, 72%, 73%, 74%, 75%, 76%, 77%, 78%, 79%, 80%, 81%, 82%, 83%, 84%, 85%, 86%, 87%, 88%, 89%, 90%, 91%, 92%, 93%, 94%, 95%, 96%, 97%, 98%, 99%, or 100% sequence identity, based on the Clustal V or Clustal W method of alignment, when compared to SEQ ID NO:18, 39, 43, 45, 47, 49, 51,55, 59, 61, 64, 65, 66, 95, 97, 101, 103, 107, 111, 113, 117, 119, 121, 123, 127, 129, 130, 131, 132, 135, 627 or 628, and combinations thereof, or (ii) a full complement of the nucleic acid sequence of (a)(i); or (b) a region derived from all or part of a sense strand or antisense strand of a target gene of interest, said region having a nucleic acid sequence of at least 50%, 51%, 52%, 53%, 54%, 55%, 56%, 57%, 58%, 59%, 60%, 61%, 62%, 63%, 64%, 65%, 66%, 67%, 68%, 69%, 70%, 71%, 72%, 73%, 74%, 75%, 76%, 77%, 78%, 79%, 80%, 81%, 82%, 83%, 84%, 85%, 86%, 87%, 88%, 89%, 90%, 91%, 92%, 93%, 94%, 95%, 96%, 97%, 98%, 99%, or 100% sequence identity, based on the Clustal V or Clustal W method of alignment, when compared to said all or part of a sense strand or antisense strand from which said region is derived, and wherein said target gene of interest encodes a DTP4 polypeptide; or (c) all or part of: (i) a nucleic acid sequence of at least 50%, 51%, 52%, 53%, 54%, 55%, 56%, 57%, 58%, 59%, 60%, 61%, 62%, 63%, 64%, 65%, 66%, 67%, 68%, 69%, 70%, 71%, 72%, 73%, 74%, 75%, 76%, 77%, 78%, 79%, 80%, 81%, 82%, 83%, 84%, 85%, 86%, 87%, 88%, 89%, 90%, 91%, 92%, 93%, 94%, 95%, 96%, 97%, 98%, 99%, or 100% sequence identity, based on the Clustal V or Clustal W method of alignment, when compared to SEQ ID NO:16, 17, 19, 38, 42, 44, 46, 48, 50, 54, 58, 60, 62, 63, 94, 96, 100, 102, 106, 110, 112, 116, 118, 120 or 122, and combinations thereof, or (ii) a full complement of the nucleic acid sequence of (c)(i). The suppression DNA construct may comprise a cosuppression construct, antisense construct, viral-suppression construct, hairpin suppression construct, stem-loop suppression construct, double-stranded RNA-producing construct, RNAi construct, or small RNA construct (e.g., an siRNA construct or an miRNA construct).

[0256] It is understood, as those skilled in the art will appreciate, that the disclosure encompasses more than the specific exemplary sequences. Alterations in a nucleic acid fragment which result in the production of a chemically equivalent amino acid at a given site, but do not affect the functional properties of the encoded polypeptide, are well known in the art. For example, a codon for the amino acid alanine, a hydrophobic amino acid, may be substituted by a codon encoding another less hydrophobic residue, such as glycine, or a more hydrophobic residue, such as valine, leucine, or isoleucine. Similarly, changes which result in substitution of one negatively charged residue for another, such as aspartic acid for glutamic acid, or one positively charged residue for another, such as lysine for arginine, can also be expected to produce a functionally equivalent product. Nucleotide changes which result in alteration of the N-terminal and C-terminal portions of the polypeptide molecule would also not be expected to alter the activity of the polypeptide. Each of the proposed modifications is well within the routine skill in the art, as is determination of retention of biological activity of the encoded products.

[0257] “Suppression DNA construct” is a recombinant DNA construct which when transformed or stably integrated into the genome of the plant, results in “silencing” of a target gene in the plant. The target gene may be endogenous or transgenic to the plant. “Silencing,” as used herein with respect to the target gene, refers generally to the suppression of levels of mRNA or protein/enzyme expressed by the target gene, and/or the level of the enzyme activity or protein functionality. The terms “suppression”, “suppressing” and “silencing”, used interchangeably herein, include lowering, reducing, declining, decreasing, inhibiting, eliminating or preventing. “Silencing” or “gene silencing” does not specify mechanism and is inclusive, and not limited to, anti-sense, cosuppression, viral-suppression, hairpin suppression, stem-loop suppression, RNAi-based approaches, and small RNA-based approaches.

[0258] A suppression DNA construct may comprise a region derived from a target gene of interest and may comprise all or part of the nucleic acid sequence of the sense strand (or antisense strand) of the target gene of interest. Depending upon the approach to be utilized, the region may be 100% identical or less than 100% identical (e.g., at least 50%, 51%, 52%, 53%, 54%, 55%, 56%, 57%, 58%, 59%, 60%, 61%, 62%, 63%, 64%, 65%, 66%, 67%, 68%, 69%, 70%, 71%, 72%, 73%, 74%, 75%, 76%, 77%, 78%, 79%, 80%, 81%, 82%, 83%, 84%, 85%, 86%, 87%, 88%, 89%, 90%, 91%, 92%, 93%, 94%, 95%, 96%, 97%, 98%, or 99% identical) to all or part of the sense strand (or antisense strand) of the gene of interest.

[0259] A suppression DNA construct may comprise 100, 200, 300, 400, 500, 600, 700, 800, 900 or 1000 contiguous nucleotides of the sense strand (or antisense strand) of the gene of interest, and combinations thereof.

[0260] Suppression DNA constructs are well-known in the art, are readily constructed once the target gene of interest is selected, and include, without limitation, cosuppression constructs, antisense constructs, viral-suppression constructs, hairpin suppression constructs, stem-loop suppression constructs, double-stranded RNA-producing constructs, and more generally, RNAi (RNA interference) constructs and small RNA constructs such as siRNA (short interfering RNA) constructs and miRNA (microRNA) constructs.

[0261] Suppression of gene expression may also be achieved by use of artificial miRNA precursors, ribozyme constructs and gene disruption. A modified plant miRNA precursor may be used, wherein the precursor has been modified to replace the miRNA encoding region with a sequence designed to produce a miRNA directed to the nucleotide sequence of interest. Gene disruption may be achieved by use of transposable elements or by use of chemical agents that cause site-specific mutations.

[0262] “Antisense inhibition” generally refers to the production of antisense RNA transcripts capable of suppressing the expression of the target gene or gene product. “Antisense RNA” generally refers to an RNA transcript that is complementary to all or part of a target primary transcript or mRNA and that blocks the expression of a target isolated nucleic acid fragment (U.S. Pat. No. 5,107,065). The complementarity of an antisense RNA may be with any part of the specific gene transcript, i.e., at the 5′ non-coding sequence, 3′ non-coding sequence, introns, or the coding sequence.

[0263] “Cosuppression” generally refers to the production of sense RNA transcripts capable of suppressing the expression of the target gene or gene product. “Sense” RNA generally refers to RNA transcript that includes the mRNA and can be translated into protein within a cell or in vitro. Cosuppression constructs in plants have been previously designed by focusing on overexpression of a nucleic acid sequence having homology to a native mRNA, in the sense orientation, which results in the reduction of all RNA having homology to the overexpressed sequence (see Vaucheret et al., Plant J. 16:651-659 (1998); and Gura, Nature 404:804-808 (2000)).

[0264] Another variation describes the use of plant viral sequences to direct the suppression of proximal mRNA encoding sequences (PCT Publication No. WO 98/36083 published on Aug. 20, 1998).

[0265] RNA interference generally refers to the process of sequence-specific post-transcriptional gene silencing in animals mediated by short interfering RNAs (siRNAs) (Fire et al., Nature 391:806 (1998)). The corresponding process in plants is commonly referred to as post-transcriptional gene silencing (PTGS) or RNA silencing and is also referred to as quelling in fungi. The process of post-transcriptional gene silencing is thought to be an evolutionarily-conserved cellular defense mechanism used to prevent the expression of foreign genes and is commonly shared by diverse flora and phyla (Fire et al., Trends Genet. 15:358 (1999)).

[0266] Small RNAs play an important role in controlling gene expression. Regulation of many developmental processes, including flowering, is controlled by small RNAs. It is now possible to engineer changes in gene expression of plant genes by using transgenic constructs which produce small RNAs in the plant.

[0267] Small RNAs appear to function by base-pairing to complementary RNA or DNA target sequences. When bound to RNA, small RNAs trigger either RNA cleavage or translational inhibition of the target sequence. When bound to DNA target sequences, it is thought that small RNAs can mediate DNA methylation of the target sequence. The consequence of these events, regardless of the specific mechanism, is that gene expression is inhibited.

[0268] MicroRNAs (miRNAs) are noncoding RNAs of about 19 to about 24 nucleotides (nt) in length that have been identified in both animals and plants (Lagos-Quintana et al., Science 294:853-858 (2001), Lagos-Quintana et al., Curr. Biol. 12:735-739 (2002); Lau et al., Science 294:858-862 (2001); Lee and Ambros, Science 294:862-864 (2001); Llave et al., Plant Cell 14:1605-1619 (2002); Mourelatos et al., Genes Dev. 16:720-728 (2002); Park et al., Curr. Biol. 12:1484-1495 (2002); Reinhart et al., Genes. Dev. 16:1616-1626 (2002)). They are processed from longer precursor transcripts that range in size from approximately 70 to 200 nt, and these precursor transcripts have the ability to form stable hairpin structures.

[0269] MicroRNAs (miRNAs) appear to regulate target genes by binding to complementary sequences located in the transcripts produced by these genes. It seems likely that miRNAs can enter at least two pathways of target gene regulation: (1) translational inhibition; and (2) RNA cleavage. MicroRNAs entering the RNA cleavage pathway are analogous to the 21-25 nt short interfering RNAs (siRNAs) generated during RNA interference (RNAi) in animals and posttranscriptional gene silencing (PTGS) in plants, and likely are incorporated into an RNA-induced silencing complex (RISC) that is similar or identical to that seen for RNAi.

[0270] The terms “miRNA-star sequence” and “miRNA* sequence” are used interchangeably herein and they refer to a sequence in the miRNA precursor that is highly complementary to the miRNA sequence. The miRNA and miRNA* sequences form part of the stem region of the miRNA precursor hairpin structure.

[0271] In one embodiment, there is provided a method for the suppression of a target sequence comprising introducing into a cell a nucleic acid construct encoding a miRNA substantially complementary to the target. In some embodiments the miRNA comprises about 19, 20, 21, 22, 23, 24 or 25 nucleotides. In some embodiments the miRNA comprises 21 nucleotides. In some embodiments the nucleic acid construct encodes the miRNA. In some embodiments the nucleic acid construct encodes a polynucleotide precursor which may form a double-stranded RNA, or hairpin structure comprising the miRNA.

[0272] In some embodiments, the nucleic acid construct comprises a modified endogenous plant miRNA precursor, wherein the precursor has been modified to replace the endogenous miRNA encoding region with a sequence designed to produce a miRNA directed to the target sequence. The plant miRNA precursor may be full-length of may comprise a fragment of the full-length precursor. In some embodiments, the endogenous plant miRNA precursor is from a dicot or a monocot. In some embodiments the endogenous miRNA precursor is from Arabidopsis, tomato, maize, soybean, sunflower, sorghum, canola, wheat, alfalfa, cotton, rice, barley, millet, sugar cane or switchgrass.

[0273] In some embodiments, the miRNA template, (i.e. the polynucleotide encoding the miRNA), and thereby the miRNA, may comprise some mismatches relative to the target sequence. In some embodiments the miRNA template has >1 nucleotide mismatch as compared to the target sequence, for example, the miRNA template can have 1, 2, 3, 4, 5, or more mismatches as compared to the target sequence. This degree of mismatch may also be described by determining the percent identity of the miRNA template to the complement of the target sequence. For example, the miRNA template may have a percent identity including about at least 70%, 75%, 77%, 78%, 79%, 80%, 81%, 82%, 83%, 84%, 85%, 86%, 87%, 88%, 89%, 90%, 91%, 92%, 93%, 94%, 95%, 96%, 97%, 98%, 99%, or 100% as compared to the complement of the target sequence.

[0274] In some embodiments, the miRNA template, (i.e. the polynucleotide encoding the miRNA) and thereby the miRNA, may comprise some mismatches relative to the miRNA-star sequence. In some embodiments the miRNA template has >1 nucleotide mismatch as compared to the miRNA-star sequence, for example, the miRNA template can have 1, 2, 3, 4, 5, or more mismatches as compared to the miRNA-star sequence. This degree of mismatch may also be described by determining the percent identity of the miRNA template to the complement of the miRNA-star sequence. For example, the miRNA template may have a percent identity including about at least 70%, 75%, 77%, 78%, 79%, 80%, 81%, 82%, 83%, 84%, 85%, 86%, 87%, 88%, 89%, 90%, 91%, 92%, 93%, 94%, 95%, 96%, 97%, 98%, 99%, or 100% as compared to the complement of the miRNA-star sequence.

### Regulatory Sequences:

[0275] A recombinant DNA construct (including a suppression DNA construct) of the present disclosure may comprise at least one regulatory sequence.

[0276] A regulatory sequence may be a promoter.

[0277] A number of promoters can be used in recombinant DNA constructs of the present disclosure. The promoters can be selected based on the desired outcome, and may include constitutive, tissue-specific, inducible, or other promoters for expression in the host organism.

[0278] Promoters that cause a gene to be expressed in most cell types at most times are commonly referred to as “constitutive promoters”.

[0279] High level, constitutive expression of the candidate gene under control of the 35S or UBI promoter may have pleiotropic effects, although candidate gene efficacy may be estimated when driven by a constitutive promoter. Use of tissue-specific and/or stress-specific promoters may eliminate undesirable effects but retain the ability to enhance stress tolerance. This effect has been observed in Arabidopsis (Kasuga et al. (1999) Nature Biotechnol. 17:287-91).

[0280] Suitable constitutive promoters for use in a plant host cell include, for example, the core promoter of the Rsyn7 promoter and other constitutive promoters disclosed in WO 99/43838 and U.S. Pat. No. 6,072,050; the core CaMV 35S promoter (Odell et al., Nature 313:810-812 (1985)); rice actin (McElroy et al., Plant Cell 2:163-171 (1990)); ubiquitin (Christensen et al., Plant Mol. Biol. 12:619-632 (1989) and Christensen et al., Plant Mol. Biol. 18:675-689 (1992)); pEMU (Last et al., Theor. Appl. Genet. 81:581-588 (1991)); MAS (Velten et al., EMBO J. 3:2723-2730 (1984)); ALS promoter (U.S. Pat. No. 5,659,026), the constitutive synthetic core promoter SCP1 (International Publication No. 03/033651) and the like. Other constitutive promoters include, for example, those discussed in U.S. Pat. Nos. 5,608,149; 5,608,144; 5,604,121; 5,569,597; 5,466,785; 5,399,680; 5,268,463; 5,608,142; and 6,177,611.

[0281] In choosing a promoter to use in the methods of the disclosure, it may be desirable to use a tissue-specific or developmentally regulated promoter.

[0282] A tissue-specific or developmentally regulated promoter is a DNA sequence which regulates the expression of a DNA sequence selectively in the cells/tissues of a plant critical to tassel development, seed set, or both, and limits the expression of such a DNA sequence to the period of tassel development or seed maturation in the plant. Any identifiable promoter may be used in the methods of the present disclosure which causes the desired temporal and spatial expression.

[0283] Promoters which are seed or embryo-specific and may be useful include soybean Kunitz trypsin inhibitor (Kti3, Jofuku and Goldberg, Plant Cell 1:1079-1093 (1989)), patatin (potato tubers) (Rocha-Sosa, M., et al. (1989) EMBO J. 8:23-29), convicilin, vicilin, and legumin (pea cotyledons) (Rerie, W. G., et al. (1991) Mol. Gen. Genet. 259:149-157; Newbigin, E. J., et al. (1990) Planta 180:461-470; Higgins, T. J. V., et al. (1988) Plant. Mol. Biol. 11:683-695), zein (maize endosperm) (Schemthaner, J. P., et al. (1988) EMBO J. 7:1249-1255), phaseolin (bean cotyledon) (Segupta-Gopalan, C., et al. (1985) Proc. Natl. Acad. Sci. U.S.A. 82:3320-3324), phytohemagglutinin (bean cotyledon) (Voelker, T. et al. (1987) EMBO J. 6:3571-3577), B-conglycinin and glycinin (soybean cotyledon) (Chen, Z-L, et al. (1988) EMBO J. 7:297-302), glutelin (rice endosperm), hordein (barley endosperm) (Marris, C., et al. (1988) Plant Mol. Biol. 10:359-366), glutenin and gliadin (wheat endosperm) (Colot, V., et al. (1987) EMBO J. 6:3559-3564), and sporamin (sweet potato tuberous root) (Hattori, T., et al. (1990) Plant Mol. Biol. 14:595-604). Promoters of seed-specific genes operably linked to heterologous coding regions in chimeric gene constructions maintain their temporal and spatial expression pattern in transgenic plants. Such examples include Arabidopsis thaliana 2S seed storage protein gene promoter to express enkephalin peptides in Arabidopsis and Brassica napus seeds (Vanderkerckhove et al., Bio/Technology 7:L929-932 (1989)), bean lectin and bean beta-phaseolin promoters to express luciferase (Riggs et al., Plant Sci. 63:47-57 (1989)), and wheat glutenin promoters to express chloramphenicol acetyl transferase (Colot et al., EMBO J 6:3559-3564 (1987)). Endosperm preferred promoters include those described in e.g., U.S. Pat. No. 8,466,342; U.S. Pat. No. 7,897,841; and U.S. Pat. No. 7,847,160.

[0284] Inducible promoters selectively express an operably linked DNA sequence in response to the presence of an endogenous or exogenous stimulus, for example by chemical compounds (chemical inducers) or in response to environmental, hormonal, chemical, and/or developmental signals. Inducible or regulated promoters include, for example, promoters regulated by light, heat, stress, flooding or drought, phytohormones, wounding, or chemicals such as ethanol, jasmonate, salicylic acid, or safeners.

[0285] Promoters for use include the following: 1) the stress-inducible RD29A promoter (Kasuga et al. (1999) Nature Biotechnol. 17:287-91); 2) the barley promoter, B22E; expression of B22E is specific to the pedicel in developing maize kernels (“Primary Structure of a Novel Barley Gene Differentially Expressed in Immature Aleurone Layers”. Klemsdal, S. S. et al., Mol. Gen. Genet. 228(1/2):9-16 (1991)); and 3) maize promoter, Zag2 (“Identification and molecular characterization of ZAG1, the maize homolog of the Arabidopsis floral homeotic gene AGAMOUS”, Schmidt, R. J. et al., Plant Cell 5(7):729-737 (1993); “Structural characterization, chromosomal localization and phylogenetic evaluation of two pairs of AGAMOUS-like MADS-box genes from maize”, Theissen et al. Gene 156(2):155-166 (1995); NCBI GenBank Accession No. X80206)). Zag2 transcripts can be detected 5 days prior to pollination to 7 to 8 days after pollination (“DAP”), and directs expression in the carpel of developing female inflorescences and Ciml which is specific to the nucleus of developing maize kernels. Ciml transcript is detected 4 to 5 days before pollination to 6 to 8 DAP. Other useful promoters include any promoter which can be derived from a gene whose expression is maternally associated with developing female florets.

[0286] Promoters for use also include the following: Zm-GOS2 (maize promoter for “Gene from Oryza sativa”, US publication number US2012/0110700 Sb-RCC (Sorghum promoter for Root Cortical Cell delineating protein, root specific expression), Zm-ADF4 (U.S. Pat. No. 7,902,428; Maize promoter for Actin Depolymerizing Factor), Zm-FTM1 (U.S. Pat. No. 7,842,851; maize promoter for Floral transition MADSs) promoters.

[0287] Additional promoters for regulating the expression of the nucleotide sequences in plants are stalk-specific promoters. Such stalk-specific promoters include the alfalfa S2A promoter (GenBank Accession No. EF030816; Abrahams et al., Plant Mol. Biol. 27:513-528 (1995)) and S2B promoter (GenBank Accession No. EF030817) and the like, herein incorporated by reference.

[0288] Promoters may be derived in their entirety from a native gene, or be composed of different elements derived from different promoters found in nature, or even comprise synthetic DNA segments.

[0289] In one embodiment the at least one regulatory element may be an endogenous promoter operably linked to at least one enhancer element; e.g., a 35S, nos or ocs enhancer element.

[0290] Promoters for use may include: RIP2, mLIP15, ZmCOR1, Rab17, CaMV 35S, RD29A, B22E, Zag2, SAM synthetase, ubiquitin, CaMV 19S, nos, Adh, sucrose synthase, R-allele, the vascular tissue preferred promoters S2A (Genbank accession number EF030816) and S2B (Genbank accession number EF030817), and the constitutive promoter GOS2 from Zea mays. Other promoters include root preferred promoters, such as the maize NAS2 promoter, the maize Cyclo promoter (US 2006/0156439, published Jul. 13, 2006), the maize ROOTMET2 promoter (WO05063998, published Jul. 14, 2005), the CR1BIO promoter (WO06055487, published May 26, 2006), the CRWAQ81 (WO05035770, published Apr. 21, 2005) and the maize ZRP2.47 promoter (NCBI accession number: U38790; GI No. 1063664),

[0291] Recombinant DNA constructs of the present disclosure may also include other regulatory sequences, including but not limited to, translation leader sequences, introns, and polyadenylation recognition sequences. In another embodiment of the present disclosure, a recombinant DNA construct of the present disclosure further comprises an enhancer or silencer.

[0292] The promoters disclosed herein may be used with their own introns, or with any heterologous introns to drive expression of the transgene.

[0293] An intron sequence can be added to the 5′ untranslated region, the protein-coding region or the 3′ untranslated region to increase the amount of the mature message that accumulates in the cytosol. Inclusion of a spliceable intron in the transcription unit in both plant and animal expression constructs has been shown to increase gene expression at both the mRNA and protein levels up to 1000-fold. Buchman and Berg, Mol. Cell Biol. 8:4395-4405 (1988); Callis et al., Genes Dev. 1:1183-1200 (1987).

[0294] “Transcription terminator”, “termination sequences”, or “terminator” refer to DNA sequences located downstream of a protein-coding sequence, including polyadenylation recognition sequences and other sequences encoding regulatory signals capable of affecting mRNA processing or gene expression. The polyadenylation signal is usually characterized by affecting the addition of polyadenylic acid tracts to the 3′ end of the mRNA precursor. The use of different 3′ non-coding sequences is exemplified by Ingelbrecht, I. L., et al., Plant Cell 1:671-680 (1989). A polynucleotide sequence with “terminator activity” generally refers to a polynucleotide sequence that, when operably linked to the 3′ end of a second polynucleotide sequence that is to be expressed, is capable of terminating transcription from the second polynucleotide sequence and facilitating efficient 3′ end processing of the messenger RNA resulting in addition of poly A tail. Transcription termination is the process by which RNA synthesis by RNA polymerase is stopped and both the processed messenger RNA and the enzyme are released from the DNA template.

[0295] Improper termination of an RNA transcript can affect the stability of the RNA, and hence can affect protein expression. Variability of transgene expression is sometimes attributed to variability of termination efficiency (Bieri et al (2002) Molecular Breeding 10: 107-117).

[0296] Examples of terminators for use include, but are not limited to, PinII terminator, SB-GKAF terminator (U.S. application Ser. No. 14/236,499), Actin terminator, Os-Actin terminator, Ubi terminator, Sb-Ubi terminator, Os-Ubi terminator.

[0297] Any plant can be selected for the identification of regulatory sequences and DTP4 polypeptide genes to be used in recombinant DNA constructs and other compositions (e.g. transgenic plants, seeds and cells) and methods of the present disclosure. Examples of suitable plants for the isolation of genes and regulatory sequences and for compositions and methods of the present disclosure would include but are not limited to alfalfa, apple, apricot, Arabidopsis, artichoke, arugula, asparagus, avocado, banana, barley, beans, beet, blackberry, blueberry, broccoli, brussels sprouts, cabbage, canola, cantaloupe, carrot, cassava, castorbean, cauliflower, celery, cherry, chicory, cilantro, citrus, clementines, clover, coconut, coffee, corn, cotton, cranberry, cucumber, Douglas fir, eggplant, endive, escarole, eucalyptus, fennel, figs, garlic, gourd, grape, grapefruit, honey dew, jicama, kiwifruit, lettuce, leeks, lemon, lime, Loblolly pine, linseed, mango, melon, mushroom, nectarine, nut, oat, oil palm, oil seed rape, okra, olive, onion, orange, an ornamental plant, palm, papaya, parsley, parsnip, pea, peach, peanut, pear, pepper, persimmon, pine, pineapple, plantain, plum, pomegranate, poplar, potato, pumpkin, quince, radiata pine, radicchio, radish, rapeseed, raspberry, rice, rye, sorghum, Southern pine, soybean, spinach, squash, strawberry, sugarbeet, sugarcane, sunflower, sweet potato, sweetgum, switchgrass, tangerine, tea, tobacco, tomato, triticale, turf, turnip, a vine, watermelon, wheat, yarns, and zucchini.

[0298] Compositions:

[0299] A composition of the present disclosure includes a transgenic microorganism, cell, plant, and seed comprising the recombinant DNA construct. The cell may be eukaryotic, e.g., a yeast, insect or plant cell, or prokaryotic, e.g., a bacterial cell.

[0300] A composition of the present disclosure is a plant comprising in its genome any of the recombinant DNA constructs (including any of the suppression DNA constructs) of the present disclosure (such as any of the constructs discussed above). Compositions also include any progeny of the plant, and any seed obtained from the plant or its progeny, wherein the progeny or seed comprises within its genome the recombinant DNA construct (or suppression DNA construct). Progeny includes subsequent generations obtained by self-pollination or out-crossing of a plant. Progeny also includes hybrids and inbreds.

[0301] In hybrid seed propagated crops, mature transgenic plants can be self-pollinated to produce a homozygous inbred plant. The inbred plant produces seed containing the newly introduced recombinant DNA construct (or suppression DNA construct). These seeds can be grown to produce plants that would exhibit an altered agronomic characteristic (e.g., an increased agronomic characteristic optionally under stress conditions), or used in a breeding program to produce hybrid seed, which can be grown to produce plants that would exhibit such an altered agronomic characteristic. The seeds may be maize seeds. The stress condition may be selected from the group of drought stress, triple stress and osmotic stress.

[0302] The plant may be a monocotyledonous or dicotyledonous plant, for example, a maize or soybean plant. The plant may also be sunflower, sorghum, canola, wheat, alfalfa, cotton, rice, barley, millet, sugar cane or switchgrass. The plant may be a hybrid plant or an inbred plant.

[0303] The recombinant DNA construct may be stably integrated into the genome of the plant.

[0304] Particular embodiments include but are not limited to the following:

[0305] 1. A plant (for example, a maize, rice or soybean plant) comprising in its genome a recombinant DNA construct comprising a polynucleotide operably linked to at least one heterologous regulatory sequence, wherein said polynucleotide encodes a polypeptide having an amino acid sequence of at least 50%, 51%, 52%, 53%, 54%, 55%, 56%, 57%, 58%, 59%, 60%, 61%, 62%, 63%, 64%, 65%, 66%, 67%, 68%, 69%, 70%, 71%, 72%, 73%, 74%, 75%, 76%, 77%, 78%, 79%, 80%, 81%, 82%, 83%, 84%, 85%, 86%, 87%, 88%, 89%, 90%, 91%, 92%, 93%, 94%, 95%, 96%, 97%, 98%, 99%, or 100% sequence identity, based on the Clustal V or Clustal W method of alignment, when compared to SEQ ID NO:18, 39, 43, 45, 47, 49, 51,55, 59, 61,64, 65, 66, 95, 97, 101, 103, 107, 111, 113, 117, 119, 121, 123, 127, 129, 130, 131, 132, 135, 627 or 628, and wherein said plant exhibits at least one phenotype selected from the group consisting of increased triple stress tolerance, increased drought stress tolerance, increased nitrogen stress tolerance, increased osmotic stress tolerance, altered ABA response, altered root architecture, increased tiller number, when compared to a control plant not comprising said recombinant DNA construct. The plant may further exhibit an alteration of at least one agronomic characteristic when compared to the control plant.

[0306] The plant may exhibit alteration of at least one agronomic characteristic selected from the group consisting of: abiotic stress tolerance, greenness, yield, growth rate, biomass, fresh weight at maturation, dry weight at maturation, fruit yield, seed yield, total plant nitrogen content, fruit nitrogen content, seed nitrogen content, nitrogen content in a vegetative tissue, total plant free amino acid content, fruit free amino acid content, seed free amino acid content, free amino acid content in a vegetative tissue, total plant protein content, fruit protein content, seed protein content, protein content in a vegetative tissue, drought tolerance, nitrogen uptake, root lodging, harvest index, stalk lodging, plant height, ear height, ear length, leaf number, tiller number, growth rate, first pollen shed time, first silk emergence time, anthesis silking interval (ASI), stalk diameter, root architecture, staygreen, relative water content, water use, water use efficiency, dry weight of either main plant, tillers, primary ear, main plant and tillers or cobs; rows of kernels, total plant weight·kernel weight, kernel number, salt tolerance, chlorophyll content, flavonol content, number of yellow leaves, early seedling vigor and seedling emergence under low temperature stress. These agronomic characteristics maybe measured at any stage of the plant development. One or more of these agronomic characteristics may be measured under stress or non-stress conditions, and may show alteration on overexpression of the recombinant constructs disclosed herein.

[0307] 2. A plant (for example, a maize, rice or soybean plant) comprising in its genome a recombinant DNA construct comprising a polynucleotide operably linked to at least one regulatory sequence, wherein said polynucleotide encodes a DTP4 polypeptide, and wherein said plant exhibits at least one phenotype selected from the group consisting of increased triple stress tolerance, increased drought stress tolerance, increased nitrogen stress tolerance, increased osmotic stress tolerance, altered ABA response, altered root architecture, increased tiller number, when compared to a control plant not comprising said recombinant DNA construct. The plant may further exhibit an alteration of at least one agronomic characteristic when compared to the control plant.

[0308] 3. A plant (for example, a maize, rice or soybean plant) comprising in its genome a recombinant DNA construct comprising a polynucleotide operably linked to at least one regulatory sequence, wherein said polynucleotide encodes a DTP4 polypeptide, and wherein said plant exhibits an alteration of at least one agronomic characteristic when compared to a control plant not comprising said recombinant DNA construct.

[0309] 4. A plant (for example, a maize, rice or soybean plant) comprising in its genome a recombinant DNA construct comprising a polynucleotide operably linked to at least one regulatory element, wherein said polynucleotide comprises a nucleotide sequence, wherein the nucleotide sequence is: (a) hybridizable under stringent conditions with a DNA molecule comprising the full complement of SEQ ID NO:16, 17, 19, 38, 42, 44, 46, 48, 50, 54, 58, 60, 62, 63, 94, 96, 100, 102, 106, 110, 112, 116, 118, 120 or 122; or (b) derived from SEQ ID NO:16, 17, 19, 38, 42, 44, 46, 48, 50, 54, 58, 60, 62, 63, 94, 96, 100, 102, 106, 110, 112, 116, 118, 120 or 122 by alteration of one or more nucleotides by at least one method selected from the group consisting of: deletion, substitution, addition and insertion; and wherein said plant exhibits at least one phenotype selected from the group consisting of increased triple stress tolerance, increased drought stress tolerance, increased nitrogen stress tolerance, increased osmotic stress tolerance, altered ABA response, altered root architecture, increased tiller number, when compared to a control plant not comprising said recombinant DNA construct. The plant may further exhibit an alteration of at least one agronomic characteristic when compared to the control plant.

[0310] 5. A plant (for example, a maize, rice or soybean plant) comprising in its genome a recombinant DNA construct comprising a polynucleotide operably linked to at least one heterologous regulatory element, wherein said polynucleotide encodes a polypeptide having an amino acid sequence of at least 50%, 51%, 52%, 53%, 54%, 55%, 56%, 57%, 58%, 59%, 60%, 61%, 62%, 63%, 64%, 65%, 66%, 67%, 68%, 69%, 70%, 71%, 72%, 73%, 74%, 75%, 76%, 77%, 78%, 79%, 80%, 81%, 82%, 83%, 84%, 85%, 86%, 87%, 88%, 89%, 90%, 91%, 92%, 93%, 94%, 95%, 96%, 97%, 98%, 99%, or 100% sequence identity, based on the Clustal V or Clustal W method of alignment, when compared to SEQ ID NO:18, 39, 43, 45, 47, 49, 51,55, 59, 61,64, 65, 66, 95, 97, 101, 103, 107, 111, 113, 117, 119, 121, 123, 127, 129, 130, 131, 132, 135, 627 or 628, and wherein said plant exhibits an alteration of at least one agronomic characteristic when compared to a control plant not comprising said recombinant DNA construct.

[0311] 6. A plant (for example, a maize, rice or soybean plant) comprising in its genome a recombinant DNA construct comprising a polynucleotide operably linked to at least one heterologous regulatory element, wherein said polynucleotide comprises a nucleotide sequence, wherein the nucleotide sequence is: (a) hybridizable under stringent conditions with a DNA molecule comprising the full complement of SEQ ID NO:16, 17, 19, 38, 42, 44, 46, 48, 50, 54, 58, 60, 62, 63, 94, 96, 100, 102, 106, 110, 112, 116, 118, 120 or 122; or (b) derived from SEQ ID NO:16, 17, 19, 38, 42, 44, 46, 48, 50, 54, 58, 60, 62, 63, 94, 96, 100, 102, 106, 110, 112, 116, 118, 120 or 122 by alteration of one or more nucleotides by at least one method selected from the group consisting of: deletion, substitution, addition and insertion; and wherein said plant exhibits an alteration of at least one agronomic characteristic when compared to a control plant not comprising said recombinant DNA construct.

[0312] 7. A plant (for example, a maize, rice or soybean plant) comprising in its genome a recombinant DNA construct comprising a polynucleotide operably linked to at least one heterologous regulatory sequence, wherein said polynucleotide encodes a polypeptide having an amino acid sequence of at least 50%, 51%, 52%, 53%, 54%, 55%, 56%, 57%, 58%, 59%, 60%, 61%, 62%, 63%, 64%, 65%, 66%, 67%, 68%, 69%, 70%, 71%, 72%, 73%, 74%, 75%, 76%, 77%, 78%, 79%, 80%, 81%, 82%, 83%, 84%, 85%, 86%, 87%, 88%, 89%, 90%, 91%, 92%, 93%, 94%, 95%, 96%, 97%, 98%, 99%, or 100% sequence identity, based on the Clustal V or Clustal W method of alignment, when compared to SEQ ID NO:18, 39, 43, 45, 47, 49, 51,55, 59, 61,64, 65, 66, 95, 97, 101, 103, 107, 111, 113, 117, 119, 121, 123, 127, 129, 130, 131, 132, 135, 627 or 628, and wherein said plant exhibits at least one phenotype selected from the group consisting of increased triple stress tolerance, increased drought stress tolerance, increased nitrogen stress tolerance, increased osmotic stress tolerance, altered ABA response, altered root architecture, increased tiller number, when compared to a control plant not comprising said recombinant DNA construct. The plant may further exhibit an increase in yield, biomass, or both when compared to the control plant.

[0313] 8. A plant (for example, a maize, rice or soybean plant) comprising in its genome a recombinant DNA construct comprising a wherein the polynucleotide is operably linked to a heterologous promoter, and encodes a polypeptide with at least one activity selected from the group consisting of: carboxylesterase, increased triple stress tolerance, increased drought stress tolerance, increased nitrogen stress tolerance, increased osmotic stress tolerance, altered ABA response, altered root architecture, increased tiller number, wherein the polypeptide gives an E-value score of 1E-15 or less when queried using a Profile Hidden Markov Model prepared using SEQ ID NOS:18, 29, 33, 45, 47, 53, 55, 61, 64, 65, 77, 78, 101, 103, 105, 107, 111, 115, 131, 132, 135, 137, 139, 141, 144, 433, 559 and 604, the query being carried out using the hmmsearch algorithm wherein the Z parameter is set to 1 billion, and wherein said plant exhibits at least one phenotype selected from the group consisting of increased triple stress tolerance, increased drought stress tolerance, increased nitrogen stress tolerance, increased osmotic stress tolerance, altered ABA response, altered root architecture, increased tiller number, when compared to a control plant not comprising said recombinant DNA construct. The plant may further exhibit an increase in yield, biomass, or both when compared to the control plant. The polypeptide may give an E-value score of 1E-15, 1E-25, 1E-35, 1E-45, 1E-55, 1E-65, 1E-70, 1E-75, 1E-80 and 1E-85.

[0314] 9. A plant (for example, a maize, rice or soybean plant) comprising in its genome a suppression DNA construct comprising at least one heterologous regulatory element operably linked to a region derived from all or part of a sense strand or antisense strand of a target gene of interest, said region having a nucleic acid sequence of at least 50%, 51%, 52%, 53%, 54%, 55%, 56%, 57%, 58%, 59%, 60%, 61%, 62%, 63%, 64%, 65%, 66%, 67%, 68%, 69%, 70%, 71%, 72%, 73%, 74%, 75%, 76%, 77%, 78%, 79%, 80%, 81%, 82%, 83%, 84%, 85%, 86%, 87%, 88%, 89%, 90%, 91%, 92%, 93%, 94%, 95%, 96%, 97%, 98%, 99%, or 100% sequence identity, based on the Clustal V or Clustal W method of alignment, when compared to said all or part of a sense strand or antisense strand from which said region is derived, and wherein said target gene of interest encodes a DTP4 polypeptide, and wherein said plant exhibits an alteration of at least one agronomic characteristic when compared to a control plant not comprising said suppression DNA construct.

[0315] 10. A plant (for example, a maize, rice or soybean plant) comprising in its genome a suppression DNA construct comprising at least one heterologous regulatory element operably linked to all or part of (a) a nucleic acid sequence encoding a polypeptide having an amino acid sequence of at least 50%, 51%, 52%, 53%, 54%, 55%, 56%, 57%, 58%, 59%, 60%, 61%, 62%, 63%, 64%, 65%, 66%, 67%, 68%, 69%, 70%, 71%, 72%, 73%, 74%, 75%, 76%, 77%, 78%, 79%, 80%, 81%, 82%, 83%, 84%, 85%, 86%, 87%, 88%, 89%, 90%, 91%, 92%, 93%, 94%, 95%, 96%, 97%, 98%, 99%, or 100% sequence identity, based on the Clustal V method of alignment, when compared to SEQ ID NO:18, 39, 43, 45, 47, 49, 51, 55, 59, 61,64, 65, 66, 95, 97, 101, 103, 107, 111, 113, 117, 119, 121, 123, 127, 129, 130, 131, 132, 135, 627 or 628, or (b) a full complement of the nucleic acid sequence of (a), and wherein said plant exhibits an alteration of at least one agronomic characteristic when compared to a control plant not comprising said suppression DNA construct.

[0316] 11. A plant (for example, a maize, rice or soybean plant) comprising in its genome a polynucleotide (optionally an endogenous polynucleotide) operably linked to at least one heterologous regulatory element, wherein said polynucleotide encodes a polypeptide having an amino acid sequence of at least 50%, 51%, 52%, 53%, 54%, 55%, 56%, 57%, 58%, 59%, 60%, 61%, 62%, 63%, 64%, 65%, 66%, 67%, 68%, 69%, 70%, 71%, 72%, 73%, 74%, 75%, 76%, 77%, 78%, 79%, 80%, 81%, 82%, 83%, 84%, 85%, 86%, 87%, 88%, 89%, 90%, 91%, 92%, 93%, 94%, 95%, 96%, 97%, 98%, 99%, or 100% sequence identity, based on the Clustal V or Clustal W method of alignment, when compared to SEQ ID NO:18, 39, 43, 45, 47, 49, 51,55, 59, 61,64, 65, 66, 95, 97, 101, 103, 107, 111, 113, 117, 119, 121, 123, 127, 129, 130, 131, 132, 135, 627 or 628, and wherein said plant exhibits at least one phenotype selected from the group consisting of increased triple stress tolerance, increased drought stress tolerance, increased nitrogen stress tolerance, increased osmotic stress tolerance, altered ABA response, altered root architecture, increased tiller number when compared to a control plant not comprising the recombinant regulatory element. The at least one heterologous regulatory element may comprise an enhancer sequence or a multimer of identical or different enhancer sequences. The at least one heterologous regulatory element may comprise one, two, three or four copies of the CaMV 35S enhancer.

[0317] 12. Any progeny of the plants in the embodiments described herein, any seeds of the plants in the embodiments described herein, any seeds of progeny of the plants in embodiments described herein, and cells from any of the above plants in embodiments described herein and progeny thereof.

[0318] In any of the embodiments described herein, the plant may exhibit alteration of at least one agronomic characteristic selected from the group consisting of: abiotic stress tolerance, greenness, yield, growth rate, biomass, fresh weight at maturation, dry weight at maturation, fruit yield, seed yield, total plant nitrogen content, fruit nitrogen content, seed nitrogen content, nitrogen content in a vegetative tissue, total plant free amino acid content, fruit free amino acid content, seed free amino acid content, free amino acid content in a vegetative tissue, total plant protein content, fruit protein content, seed protein content, protein content in a vegetative tissue, drought tolerance, nitrogen uptake, root lodging, harvest index, stalk lodging, plant height, ear height, ear length, leaf number, tiller number, growth rate, first pollen shed time, first silk emergence time, anthesis silking interval (ASI), stalk diameter, root architecture, staygreen, relative water content, water use, water use efficiency, dry weight of either main plant, tillers, primary ear, main plant and tillers or cobs; rows of kernels, total plant weight·kernel weight, kernel number, salt tolerance, chlorophyll content, flavonol content, number of yellow leaves, early seedling vigor and seedling emergence under low temperature stress. These agronomic characteristics maybe measured at any stage of the plant development. One or more of these agronomic characteristics may be measured under stress or non-stress conditions, and may show alteration on overexpression of the recombinant constructs disclosed herein.

[0319] In any of the embodiments described herein, the DTP4 polypeptide may be from Arabidopsis thaliana, Zea mays, Glycine max, Glycine tabacina, Glycine soja, Glycine tomentella, Oryza sativa, Brassica napus, Sorghum bicolor, Saccharum officinarum, Triticum aestivum or any other plant species disclosed herein.

[0320] In any of the embodiments described herein, the recombinant DNA construct (or suppression DNA construct) may comprise at least a promoter functional in a plant as a regulatory sequence.

[0321] In any of the embodiments described herein or any other embodiments of the present disclosure, the alteration of at least one agronomic characteristic is either an increase or decrease.

[0322] In any of the embodiments described herein, the plant may exhibit the alteration of at least one agronomic characteristic when compared, under at least one stress condition, to a control plant not comprising said recombinant DNA construct (or said suppression DNA construct). The at least one stress condition may be selected from the group consisting of drought stress, triple stress, nitrogen stress and osmotic stress.

[0323] In one embodiment, “yield” can be measured in many ways, including, for example, test weight, seed weight, seed number per plant, seed number per unit area (i.e. seeds, or weight of seeds, per acre), bushels per acre, tonnes per acre, tons per acre, kilo per hectare.

[0324] In any of the embodiments described herein, the plant may exhibit less yield loss relative to the control plants, for example, at least 25%, at least 20%, at least 15%, at least 10% or at least 5% less yield loss, under water limiting conditions, or would have increased yield, for example, at least 5%, at least 10%, at least 15%, at least 20% or at least 25% increased yield, relative to the control plants under water non-limiting conditions.

[0325] In any of the embodiments described herein, the plant may exhibit less yield loss relative to the control plants, for example, at least 25%, at least 20%, at least 15%, at least 10% or at least 5% less yield loss, under stress conditions, or would have increased yield, for example, at least 5%, at least 10%, at least 15%, at least 20% or at least 25% increased yield, relative to the control plants under non-stress conditions. The stress may be selected from the group consisting of drought stress, triple stress, nitrogen stress and osmotic stress.

[0326] The terms “stress tolerance” or “stress resistance” as used herein generally refers to a measure of a plants ability to grow under stress conditions that would detrimentally affect the growth, vigor, yield, and size, of a “non-tolerant” plant of the same species. Stress tolerant plants grow better under conditions of stress than non-stress tolerant plants of the same species. For example, a plant with increased growth rate, compared to a plant of the same species and/or variety, when subjected to stress conditions that detrimentally affect the growth of another plant of the same species would be said to be stress tolerant. A plant with “increased stress tolerance” can exhibit increased tolerance to one or more different stress conditions.

[0327] “Increased stress tolerance” of a plant is measured relative to a reference or control plant, and is a trait of the plant to survive under stress conditions over prolonged periods of time, without exhibiting the same degree of physiological or physical deterioration relative to the reference or control plant grown under similar stress conditions. Typically, when a transgenic plant comprising a recombinant DNA construct or suppression DNA construct in its genome exhibits increased stress tolerance relative to a reference or control plant, the reference or control plant does not comprise in its genome the recombinant DNA construct or suppression DNA construct.

[0328] “Drought” generally refers to a decrease in water availability to a plant that, especially when prolonged, can cause damage to the plant or prevent its successful growth (e.g., limiting plant growth or seed yield). “Water limiting conditions” generally refers to a plant growth environment where the amount of water is not sufficient to sustain optimal plant growth and development. The terms “drought” and “water limiting conditions” are used interchangeably herein.

[0329] “Drought tolerance” is a trait of a plant to survive under drought conditions over prolonged periods of time without exhibiting substantial physiological or physical deterioration.

[0330] “Drought tolerance activity” of a polypeptide indicates that over-expression of the polypeptide in a transgenic plant confers increased drought tolerance to the transgenic plant relative to a reference or control plant.

[0331] “Increased drought tolerance” of a plant is measured relative to a reference or control plant, and is a trait of the plant to survive under drought conditions over prolonged periods of time, without exhibiting the same degree of physiological or physical deterioration relative to the reference or control plant grown under similar drought conditions. Typically, when a transgenic plant comprising a recombinant DNA construct or suppression DNA construct in its genome exhibits increased drought tolerance relative to a reference or control plant, the reference or control plant does not comprise in its genome the recombinant DNA construct or suppression DNA construct.

[0332] “Triple stress” as used herein generally refers to the abiotic stress exerted on the plant by the combination of drought stress, high temperature stress and high light stress.

[0333] The terms “heat stress” and “temperature stress” are used interchangeably herein, and are defined as where ambient temperatures are hot enough for sufficient time that they cause damage to plant function or development, which might be reversible or irreversible in damage. “High temperature” can be either “high air temperature” or “high soil temperature”, “high day temperature” or “high night temperature, or a combination of more than one of these.

[0334] In one embodiment of the disclosure, the ambient temperature can be in the range of 30° C. to 36° C. In one embodiment of the disclosure, the duration for the high temperature stress could be in the range of 1-16 hours.

[0335] “High light intensity” and “high irradiance” and “light stress” are used interchangeably herein, and refer to the stress exerted by subjecting plants to light intensities that are high enough for sufficient time that they cause photoinhibition damage to the plant.

[0336] In one embodiment of the disclosure, the light intensity can be in the range of 250 μE to 450 μE. In one embodiment of the invention, the duration for the high light intensity stress could be in the range of 12-16 hours.

[0337] “Triple stress tolerance” is a trait of a plant to survive under the combined stress conditions of drought, high temperature and high light intensity over prolonged periods of time without exhibiting substantial physiological or physical deterioration.

[0338] “Paraquat” is an herbicide that exerts oxidative stress on the plants. Paraquat, a bipyridylium herbicide, acts by intercepting electrons from the electron transport chain at PSI. This reaction results in the production of bipyridyl radicals that readily react with dioxygen thereby producing superoxide. Paraquat tolerance in a plant has been associated with the scavenging capacity for oxyradicals (Lannelli, M. A. et al (1999) J Exp Botany, Vol. 50, No. 333, pp. 523-532). Paraquat resistant plants have been reported to have higher tolerance to other oxidative stresses as well.

[0339] “Paraquat stress” is defined as stress exerted on the plants by subjecting them to Paraquat concentrations ranging from 0.03 to 0.3 μM.

[0340] Many adverse environmental conditions such as drought, salt stress, and use of herbicide promote the overproduction of reactive oxygen species (ROS) in plant cells. ROS such as singlet oxygen, superoxide radicals, hydrogen peroxide (H₂O₂), and hydroxyl radicals are believed to be the major factor responsible for rapid cellular damage due to their high reactivity with membrane lipids, proteins, and DNA (Mittler, R. (2002)Trends Plant Sci Vol. 7 No. 9).

[0341] A polypeptide with “triple stress tolerance activity” indicates that over-expression of the polypeptide in a transgenic plant confers increased triple stress tolerance to the transgenic plant relative to a reference or control plant. A polypeptide with “paraquat stress tolerance activity” indicates that over-expression of the polypeptide in a transgenic plant confers increased Paraquat stress tolerance to the transgenic plant relative to a reference or control plant.

[0342] Typically, when a transgenic plant comprising a recombinant DNA construct or suppression DNA construct in its genome exhibits increased stress tolerance relative to a reference or control plant, the reference or control plant does not comprise in its genome the recombinant DNA construct or suppression DNA construct.

[0343] The terms “percentage germination” and “percentage seedling emergence” are used interchangeably herein, and refer to the percentage of seeds that germinate, when compared to the total number of seeds being tested.

[0344] “Germination” as used herein generally refers to the emergence of the radicle.

[0345] The term “radicle” as used herein generally refers to the embryonic root of the plant, and is terminal part of embryonic axis. It grows downward in the soil, and is the first part of a seedling to emerge from the seed during the process of germination.

[0346] The range of stress and stress response depends on the different plants which are used, i.e., it varies for example between a plant such as wheat and a plant such as Arabidopsis.

[0347] Osmosis is defined as the movement of water from low solute concentration to high solute concentration up a concentration gradient.

[0348] “Osmotic pressure” of a solution as defined herein is defined as the pressure exerted by the solute in the system. A solution with higher concentration of solutes would have higher osmotic pressure. All solutes exhibit osmotic pressure. Osmotic pressure increases as concentration of the solute increases.

[0349] The osmotic pressure exerted by 250 mM NaCl (sodium chloride) is 1.23 MPa (megapascals) (Werner, J. E. et al. (1995) Physiologia Plantarum 93: 659-666).

[0350] As used herein, the term “osmotic stress” generally refers to any stress which is associated with or induced by elevated concentrations of osmolytes and which result in a perturbation in the osmotic potential of the intracellular or extracellular environment of a cell. The term “osmotic stress” as used herein generally refers to stress exerted when the osmotic potential of the extracellular environment of the cell, tissue, seed, organ or whole plant is increased and the water potential is lowered and a substance that blocks water absorption (osmolyte) is persistently applied to the cell, tissue, seed, organ or whole plant.

[0351] With respect to the osmotic stress assay, the term “quad” as used herein refers to four components that impart osmotic stress. A “quad assay” or “quad media”, as used herein, would therefore comprise four components that impart osmotic stress, e.g., sodium chloride, sorbitol, mannitol and PEG.

[0352] An increase in the osmotic pressure of the media solution would result in increase in osmotic potential. Examples of conditions that induce osmotic stress include, but are not limited to, salinity, drought, heat, chilling and freezing.

[0353] In one embodiment of the disclosure the osmotic pressure of the media for subjecting the plants to osmotic stress is from 0.4-1.23 MPa. In other embodiments of the disclosure, the osmotic pressure of the media for subjecting the plants to osmotic stress is 0.4 MPa, 0.5 MPa, 0.6 MPa, 0.7 MPa, 0.8 MPa, 0.9 MPa, 1 MPa, 1.1 MPa, 1.2 MPa or 1.23 MPa. In other embodiments of the disclosure, the osmotic pressure of the media for subjecting the plants to osmotic stress is at least 0.4 MPa, 0.5 MPa, 0.6 MPa, 0.7 MPa, 0.8 MPa, 0.9 MPa, 1 MPa, 1.1 MPa, 1.2 MPa or 1.23 MPa. In another embodiment of the disclosure, the osmotic pressure of the media for subjecting the plants to osmotic stress is 1.23 MPa.

[0354] “Nitrogen limiting conditions” or “low nitrogen stress” refers to conditions where the amount of total available nitrogen (e.g., from nitrates, ammonia, or other known sources of nitrogen) is not sufficient to sustain optimal plant growth and development. One skilled in the art would recognize conditions where total available nitrogen is sufficient to sustain optimal plant growth and development. One skilled in the art would recognize what constitutes sufficient amounts of total available nitrogen, and what constitutes soils, media and fertilizer inputs for providing nitrogen to plants. Nitrogen limiting conditions will vary depending upon a number of factors, including but not limited to, the particular plant and environmental conditions.

[0355] Abscisic acid (ABA), a plant hormone, is known to be involved in important plant physiological functions, such as acquisition of stress response and tolerance to drought and low temperature, as well as seed maturation, dormancy, germination etc. (M. Koomneef et al., Plant Physiol. Biochem. 36:83 (1998); J. Leung & J. Giraudat, Annu. Rev. Plant. Physiol. Plant. Mol. Biol. 49:199 (1998)). Plants subjected to environmental stresses such as drought and low temperature are thought to acquire the ability to adapt to environmental stresses due to the in vivo synthesis of ABA, which causes various changes within the plant cells. A number of genes have been identified that are induced by ABA. This suggests that ABA-induced tolerance to adverse environmental conditions is a complex multigenic event.

[0356] The terms “altered ABA response” and “altered ABA sensitivity” are used interchangeably herein, and, as used herein, by these terms it is meant that a plant or plant part exhibits an altered ABA induced response, when compared to a control plant, and includes both hypersensitivity and hyposensitivity to ABA.

[0357] “Hypersensitivity” or “enhanced response” of a plant to ABA means that the plant exhibits ABA induced phenotype at lower concentration of ABA than the control plant, or exhibits increased magnitude of response than the control plant when subjected to the same concentration of ABA as the control plant.

[0358] “Hyposensitivity” or “decreased response” of a plant to ABA means that the plant exhibits ABA induced phenotype at higher concentration of ABA than the control plant, or exhibits decreased magnitude of response than the control plant when subjected to the same concentration of ABA as the control plant.

[0359] Sensitivity to ABA can be assessed at various plant developmental stages. Examples include, but are not limited to, germination, cotyledon expansion, green cotyledons, expansion of the first true leaf, altered root growth rate or developmental arrest in the seedling stage. Moreover, the concentration of ABA at which sensitivity is observed varies in a species dependent manner. For example, transgenic Arabidopsis thaliana will demonstrate sensitivity at a lower concentration than observed in Brassica or soybean.

[0360] The term “percentage greenness” or “% greenness” refers herein to the percentage of seedlings that have totally green leaves, wherein the percentage is calculated with respect to the total number of seedlings being tested. “Percentage greenness” as referred to herein is scored as the percentage of seedlings with green leaves compared to seedlings with yellow, brown or purple leaves. “Percentage greenness” can be scored at 1-leaf or 2-leaf stage for seedlings of a monocot plant, wherein the first and second leaves are true leaves. “Percentage greenness” as used herein, can be scored at 3- or 4-leaf stage for seedlings of a dicot plant, wherein two of the leaves are cotyledonary leaves, and the third and fourth leaves are true leaves. To calculate % greenness in the seedlings of a dicot plant, any seedling with any yellow or brown streaks on any of the four leaves is not considered green. To calculate % greenness in the seedlings of a monocot plant, any seedling with any yellow or brown streaks on any of the first or second leaves is not considered green. In one embodiment of the current disclosure, “percentage greenness” is calculated when all the seedlings are subjected to osmotic stress.

[0361] “True leaves” as used herein refer to the non-cotyledonary leaves of the plant or the seedling.

[0362] The term “percentage leaf emergence” or “% leaf emergence” refers herein to the percentage of seedlings that had fully expanded 1-, 2- or 3-true leaves, wherein the percentage is calculated with respect to the total number of seedlings being tested. “Percentage leaf emergence” can be scored as the appearance of fully expanded first two true leaves for the seedlings of a dicot plant. “Percentage leaf emergence” can be scored as the appearance of fully expanded first 1- or 2-true leaves for the seedlings of a monocot plant. In one embodiment of the current disclosure, the “percentage leaf emergence” is calculated when all the seedlings are subjected to osmotic stress.

[0363] One of ordinary skill in the art is familiar with protocols for simulating drought conditions and for evaluating drought tolerance of plants that have been subjected to simulated or naturally-occurring drought conditions. For example, one can simulate drought conditions by giving plants less water than normally required or no water over a period of time, and one can evaluate drought tolerance by looking for differences in physiological and/or physical condition, including (but not limited to) vigor, growth, size, or root length, or in particular, leaf color or leaf area size. Other techniques for evaluating drought tolerance include measuring chlorophyll fluorescence, photosynthetic rates and gas exchange rates.

[0364] A drought stress experiment may involve a chronic stress (i.e., slow dry down) and/or may involve two acute stresses (i.e., abrupt removal of water) separated by a day or two of recovery. Chronic stress may last 8-10 days. Acute stress may last 3-5 days. The following variables may be measured during drought stress and well watered treatments of transgenic plants and relevant control plants:

[0365] The variable “% area chg_start chronic-acute2” is a measure of the percent change in total area determined by remote visible spectrum imaging between the first day of chronic stress and the day of the second acute stress.

[0366] The variable “% area chg_start chronic-end chronic” is a measure of the percent change in total area determined by remote visible spectrum imaging between the first day of chronic stress and the last day of chronic stress.

[0367] The variable “% area chg_start chronic-harvest” is a measure of the percent change in total area determined by remote visible spectrum imaging between the first day of chronic stress and the day of harvest.

[0368] The variable “% area chg_start chronic-recovery24 hr” is a measure of the percent change in total area determined by remote visible spectrum imaging between the first day of chronic stress and 24 hrs into the recovery (24 hrs after acute stress 2).

[0369] The variable “psii_acute1” is a measure of Photosystem II (PSII) efficiency at the end of the first acute stress period. It provides an estimate of the efficiency at which light is absorbed by PSII antennae and is directly related to carbon dioxide assimilation within the leaf.

[0370] The variable “psii_acute2” is a measure of Photosystem II (PSII) efficiency at the end of the second acute stress period. It provides an estimate of the efficiency at which light is absorbed by PSII antennae and is directly related to carbon dioxide assimilation within the leaf.

[0371] The variable “fv/fm_acute1” is a measure of the optimum quantum yield (Fv/Fm) at the end of the first acute stress−(variable fluorescence difference between the maximum and minimum fluorescence/maximum fluorescence)

[0372] The variable “fv/fm_acute2” is a measure of the optimum quantum yield (Fv/Fm) at the end of the second acute stress−(variable fluorescence difference between the maximum and minimum fluorescence/maximum fluorescence).

[0373] The variable “leaf rolling_harvest” is a measure of the ratio of top image to side image on the day of harvest.

[0374] The variable “leaf rolling_recovery24 hr” is a measure of the ratio of top image to side image 24 hours into the recovery.

[0375] The variable “Specific Growth Rate (SGR)” represents the change in total plant surface area (as measured by Lemna Tec Instrument) over a single day (Y(t)=Y0*e^{r*t}). Y(t)=Y0*e^{r*t} is equivalent to % change in Y/Δt where the individual terms are as follows: Y(t)=Total surface area at t; Y0=Initial total surface area (estimated); r=Specific Growth Rate day⁻¹, and t=Days After Planting (“DAP”).

[0376] The variable “shoot dry weight” is a measure of the shoot weight 96 hours after being placed into a 104° C. oven.

[0377] The variable “shoot fresh weight” is a measure of the shoot weight immediately after being cut from the plant.

[0378] The Examples below describe some representative protocols and techniques for simulating drought conditions and/or evaluating drought tolerance.

[0379] One can also evaluate drought tolerance by the ability of a plant to maintain sufficient yield (at least 75%, 76%, 77%, 78%, 79%, 80%, 81%, 82%, 83%, 84%, 85%, 86%, 87%, 88%, 89%, 90%, 91%, 92%, 93%, 94%, 95%, 96%, 97%, 98%, 99%, or 100% yield) in field testing under simulated or naturally-occurring drought conditions (e.g., by measuring for substantially equivalent yield under drought conditions compared to non-drought conditions, or by measuring for less yield loss under drought conditions compared to a control or reference plant).

[0380] One of ordinary skill in the art would readily recognize a suitable control or reference plant to be utilized when assessing or measuring an agronomic characteristic or phenotype of a transgenic plant in any embodiment of the present disclosure in which a control plant is utilized (e.g., compositions or methods as described herein). For example, by way of non-limiting illustrations:

[0381] 1. Progeny of a transformed plant which is hemizygous with respect to a recombinant DNA construct (or suppression DNA construct), such that the progeny are segregating into plants either comprising or not comprising the recombinant DNA construct (or suppression DNA construct): the progeny comprising the recombinant DNA construct (or suppression DNA construct) would be typically measured relative to the progeny not comprising the recombinant DNA construct (or suppression DNA construct) (i.e., the progeny not comprising the recombinant DNA construct (or the suppression DNA construct) is the control or reference plant).

[0382] 2. Introgression of a recombinant DNA construct (or suppression DNA construct) into an inbred line, such as in maize, or into a variety, such as in soybean: the introgressed line would typically be measured relative to the parent inbred or variety line (i.e., the parent inbred or variety line is the control or reference plant).

[0383] 3. Two hybrid lines, where the first hybrid line is produced from two parent inbred lines, and the second hybrid line is produced from the same two parent inbred lines except that one of the parent inbred lines contains a recombinant DNA construct (or suppression DNA construct): the second hybrid line would typically be measured relative to the first hybrid line (i.e., the first hybrid line is the control or reference plant).

[0384] 4. A plant comprising a recombinant DNA construct (or suppression DNA construct): the plant may be assessed or measured relative to a control plant not comprising the recombinant DNA construct (or suppression DNA construct) but otherwise having a comparable genetic background to the plant (e.g., sharing at least 90%, 91%, 92%, 93%, 94%, 95%, 96%, 97%, 98%, 99%, or 100% sequence identity of nuclear genetic material compared to the plant comprising the recombinant DNA construct (or suppression DNA construct)). There are many laboratory-based techniques available for the analysis, comparison and characterization of plant genetic backgrounds; among these are Isozyme Electrophoresis, Restriction Fragment Length Polymorphisms (RFLPs), Randomly Amplified Polymorphic DNAs (RAPDs), Arbitrarily Primed Polymerase Chain Reaction (AP-PCR), DNA Amplification Fingerprinting (DAF), Sequence Characterized Amplified Regions (SCARs), Amplified Fragment Length Polymorphisms (AFLP®s), and Simple Sequence Repeats (SSRs) which are also referred to as Microsatellites.

[0385] Furthermore, one of ordinary skill in the art would readily recognize that a suitable control or reference plant to be utilized when assessing or measuring an agronomic characteristic or phenotype of a transgenic plant would not include a plant that had been previously selected, via mutagenesis or transformation, for the desired agronomic characteristic or phenotype.

[0386] Methods:

[0387] Methods include but are not limited to methods for increasing drought tolerance in a plant, methods for increasing triple stress tolerance in a plant, methods for increasing osmotic stress tolerance in a plant, methods for increasing nitrogen stress tolerance in a plant, methods for evaluating drought tolerance in a plant, methods for evaluating triple stress tolerance in a plant, methods for evaluating osmotic stress tolerance in a plant, methods for evaluating nitrogen stress tolerance in a plant, methods for altering ABA response in a plant, methods for increasing tiller number in a plant, methods for alteration of root architecture in a plant, methods for evaluating altered ABA response in a plant, methods for altering an agronomic characteristic in a plant, methods for determining an alteration of an agronomic characteristic in a plant, and methods for producing seed. The plant may be a monocotyledonous or dicotyledonous plant, for example, a maize or soybean plant. The plant may also be sunflower, sorghum, canola, wheat, alfalfa, cotton, rice, barley, millet, sugar cane or sorghum. The seed may be a maize or soybean seed, for example, a maize hybrid seed or maize inbred seed.

[0388] Methods include but are not limited to the following:

[0389] A method for transforming a cell (or microorganism) comprising transforming a cell (or microorganism) with any of the isolated polynucleotides or recombinant DNA constructs of the present disclosure. The cell (or microorganism) transformed by this method is also included. In particular embodiments, the cell is eukaryotic cell, e.g., a yeast, insect or plant cell, or prokaryotic, e.g., a bacterial cell. The microorganism may be Agrobacterium, e.g. Agrobacterium tumefaciens or Agrobacterium rhizogenes.

[0390] A method for producing a transgenic plant comprising transforming a plant cell with any of the isolated polynucleotides or recombinant DNA constructs (including suppression DNA constructs) of the present disclosure and regenerating a transgenic plant from the transformed plant cell. The disclosure is also directed to the transgenic plant produced by this method, and transgenic seed obtained from this transgenic plant. The transgenic plant obtained by this method may be used in other methods of the present disclosure.

[0391] A method for isolating a polypeptide of the disclosure from a cell or culture medium of the cell, wherein the cell comprises a recombinant DNA construct comprising a polynucleotide of the disclosure operably linked to at least one heterologous regulatory sequence, and wherein the transformed host cell is grown under conditions that are suitable for expression of the recombinant DNA construct.

[0392] A method of altering the level of expression of a polypeptide of the disclosure in a host cell comprising: (a) transforming a host cell with a recombinant DNA construct of the present disclosure; and (b) growing the transformed host cell under conditions that are suitable for expression of the recombinant DNA construct wherein expression of the recombinant DNA construct results in production of altered levels of the polypeptide of the disclosure in the transformed host cell.

[0393] A method of increasing stress tolerance in a plant, wherein the stress is selected from the group consisting of drought stress, triple stress, nitrogen stress and osmotic stress, the method comprising: (a) introducing into a regenerable plant cell a recombinant DNA construct comprising a polynucleotide operably linked to at least one regulatory sequence (for example, a promoter functional in a plant), wherein the polynucleotide encodes a polypeptide having an amino acid sequence of at least 50%, 51%, 52%, 53%, 54%, 55%, 56%, 57%, 58%, 59%, 60%, 61%, 62%, 63%, 64%, 65%, 66%, 67%, 68%, 69%, 70%, 71%, 72%, 73%, 74%, 75%, 76%, 77%, 78%, 79%, 80%, 81%, 82%, 83%, 84%, 85%, 86%, 87%, 88%, 89%, 90%, 91%, 92%, 93%, 94%, 95%, 96%, 97%, 98%, 99%, or 100% sequence identity, based on the Clustal V or Clustal W method of alignment, when compared to SEQ ID NO:18, 39, 43, 45, 47, 49, 51,55, 59, 61, 64, 65, 66, 95, 97, 101, 103, 107, 111, 113, 117, 119, 121, 123, 127, 129, 130, 131, 132, 135, 627 or 628; and (b) regenerating a transgenic plant from the regenerable plant cell after step (a), wherein the transgenic plant comprises in its genome the recombinant DNA construct and exhibits increased stress tolerance, wherein the stress is selected from the group consisting of drought stress, triple stress, nitrogen stress and osmotic stress, when compared to a control plant not comprising the recombinant DNA construct. The method may further comprise (c) obtaining a progeny plant derived from the transgenic plant, wherein said progeny plant comprises in its genome the recombinant DNA construct and exhibits increased stress tolerance, wherein the stress is selected from the group consisting of drought stress, triple stress, nitrogen stress and osmotic stress, when compared to a control plant not comprising the recombinant DNA construct.

[0394] A method of increasing stress tolerance, wherein the stress is selected from the group consisting of drought stress, triple stress and osmotic stress the method comprising: (a) introducing into a regenerable plant cell a recombinant DNA construct comprising a polynucleotide operably linked to at least one heterologous regulatory element, wherein said polynucleotide comprises a nucleotide sequence, wherein the nucleotide sequence is: (a) hybridizable under stringent conditions with a DNA molecule comprising the full complement of SEQ ID NO:16, 17, 19, 38, 42, 44, 46, 48, 50, 54, 58, 60, 62, 63, 94, 96, 100, 102, 106, 110, 112, 116, 118, 120 or 122; or (b) derived from SEQ ID NO:16, 17, 19, 38, 42, 44, 46, 48, 50, 54, 58, 60, 62, 63, 94, 96, 100, 102, 106, 110, 112, 116, 118, 120 or 122, by alteration of one or more nucleotides by at least one method selected from the group consisting of: deletion, substitution, addition and insertion; and (b) regenerating a transgenic plant from the regenerable plant cell after step (a), wherein the transgenic plant comprises in its genome the recombinant DNA construct and exhibits increased stress tolerance, wherein the stress is selected from the group consisting of drought stress, triple stress, nitrogen stress and osmotic stress, when compared to a control plant not comprising the recombinant DNA construct. The method may further comprise (c) obtaining a progeny plant derived from the transgenic plant, wherein said progeny plant comprises in its genome the recombinant DNA construct and exhibits increased stress tolerance, wherein the stress is selected from the group consisting of drought stress, triple stress, nitrogen stress and osmotic stress, when compared to a control plant not comprising the recombinant DNA construct.

[0395] A method of selecting for (or identifying) increased stress tolerance in a plant, wherein the stress is selected from the group consisting of drought stress, triple stress, nitrogen stress and osmotic stress, the method comprising (a) obtaining a transgenic plant, wherein the transgenic plant comprises in its genome a recombinant DNA construct comprising a polynucleotide operably linked to at least one heterologous regulatory sequence (for example, a promoter functional in a plant), wherein said polynucleotide encodes a polypeptide having an amino acid sequence of at least 50%, 51%, 52%, 53%, 54%, 55%, 56%, 57%, 58%, 59%, 60%, 61%, 62%, 63%, 64%, 65%, 66%, 67%, 68%, 69%, 70%, 71%, 72%, 73%, 74%, 75%, 76%, 77%, 78%, 79%, 80%, 81%, 82%, 83%, 84%, 85%, 86%, 87%, 88%, 89%, 90%, 91%, 92%, 93%, 94%, 95%, 96%, 97%, 98%, 99%, or 100% sequence identity, based on the Clustal V or Clustal W method of alignment, when compared to SEQ ID NO:18, 39, 43, 45, 47, 49, 51,55, 59, 61, 64, 65, 66, 95, 97, 101, 103, 107, 111,113, 117, 119, 121, 123, 127, 129, 130, 131, 132, 135, 627 or 628; (b) obtaining a progeny plant derived from said transgenic plant, wherein the progeny plant comprises in its genome the recombinant DNA construct; and (c) selecting (or identifying) the progeny plant with increased stress tolerance, wherein the stress is selected from the group consisting of drought stress, triple stress, nitrogen stress and osmotic stress tolerance, compared to a control plant not comprising the recombinant DNA construct.

[0396] In another embodiment, a method of selecting for (or identifying) increased stress tolerance in a plant, wherein the stress is selected from the group consisting of drought stress, triple stress, nitrogen stress and osmotic stress, the method comprising: (a) obtaining a transgenic plant, wherein the transgenic plant comprises in its genome a recombinant DNA construct comprising a polynucleotide operably linked to at least one heterologous regulatory element, wherein said polynucleotide encodes a polypeptide having an amino acid sequence of at least 50%, 51%, 52%, 53%, 54%, 55%, 56%, 57%, 58%, 59%, 60%, 61%, 62%, 63%, 64%, 65%, 66%, 67%, 68%, 69%, 70%, 71%, 72%, 73%, 74%, 75%, 76%, 77%, 78%, 79%, 80%, 81%, 82%, 83%, 84%, 85%, 86%, 87%, 88%, 89%, 90%, 91%, 92%, 93%, 94%, 95%, 96%, 97%, 98%, 99%, or 100% sequence identity, based on the Clustal V or Clustal W method of alignment, when compared to SEQ ID NO:18, 39, 43, 45, 47, 49, 51,55, 59, 61,64, 65, 66, 95, 97, 101, 103, 107, 111, 113, 117, 119, 121, 123, 127, 129, 130, 131, 132, 135, 627 or 628; (b) growing the transgenic plant of part (a) under conditions wherein the polynucleotide is expressed; and (c) selecting (or identifying) the transgenic plant of part (b) with increased stress tolerance, wherein the stress is selected from the group consisting of drought stress, triple stress, nitrogen stress and osmotic stress, compared to a control plant not comprising the recombinant DNA construct.

[0397] A method of selecting for (or identifying) increased stress tolerance in a plant, wherein the stress is selected from the group consisting of drought stress, triple stress, nitrogen stress and osmotic stress the method comprising: (a) obtaining a transgenic plant, wherein the transgenic plant comprises in its genome a recombinant DNA construct comprising a polynucleotide operably linked to at least one heterologous regulatory element, wherein said polynucleotide comprises a nucleotide sequence, wherein the nucleotide sequence is: (i) hybridizable under stringent conditions with a DNA molecule comprising the full complement of SEQ ID NO:16, 17, 19, 38, 42, 44, 46, 48, 50, 54, 58, 60, 62, 63, 94, 96, 100, 102, 106, 110, 112, 116, 118, 120 or 122; or (ii) derived from SEQ ID NO:16, 17, 19, 38, 42, 44, 46, 48, 50, 54, 58, 60, 62, 63, 94, 96, 100, 102, 106, 110, 112, 116, 118, 120 or 122 by alteration of one or more nucleotides by at least one method selected from the group consisting of: deletion, substitution, addition and insertion; (b) obtaining a progeny plant derived from said transgenic plant, wherein the progeny plant comprises in its genome the recombinant DNA construct; and (c) selecting (or identifying) the progeny plant with increased stress tolerance, when compared to a control plant not comprising the recombinant DNA construct.

[0398] A method of making a plant that exhibits at least one phenotype selected from the group consisting of: increased triple stress tolerance, increased drought stress tolerance, increased nitrogen stress tolerance, increased osmotic stress tolerance, altered ABA response, altered root architecture, increased tiller number, increased yield and increased biomass, when compared to a control plant, the method comprising the steps of introducing into a plant a recombinant DNA construct comprising a polynucleotide operably linked to at least one heterologous regulatory element, wherein said polynucleotide encodes a polypeptide having an amino acid sequence of at least 80% sequence identity, when compared to SEQ ID NO:18, 39, 43, 45, 47, 49, 51,55, 59, 61,64, 65, 66, 95, 97, 101, 103, 107, 111, 113, 117, 119, 121, 123, 127, 129, 130, 131, 132, 135, 627 or 628.

[0399] A method of producing a plant that exhibits at least one phenotype selected from the group consisting of: increased triple stress tolerance, increased drought stress tolerance, increased nitrogen stress tolerance, increased osmotic stress tolerance, altered ABA response, altered root architecture, increased tiller number, increased yield and increased biomass, wherein the method comprises growing a plant from a seed comprising a recombinant DNA construct, wherein the recombinant DNA construct comprises a polynucleotide operably linked to at least one heterologous regulatory element, wherein the polynucleotide encodes a polypeptide having an amino acid sequence of at least 80% sequence identity, when compared to SEQ ID NO:18, 39, 43, 45, 47, 49, 51, 55, 59, 61,64, 65, 66, 95, 97, 101, 103, 107, 111, 113, 117, 119, 121, 123, 127, 129, 130, 131, 132, 135, 627 or 628, wherein the plant exhibits at least one phenotype selected from the group consisting of: increased triple stress tolerance, increased drought stress tolerance, increased nitrogen stress tolerance, increased osmotic stress tolerance, altered ABA response, altered root architecture, increased tiller number, increased yield and increased biomass, when compared to a control plant not comprising the recombinant DNA construct.

[0400] A method of making a plant that exhibits at least one phenotype selected from the group consisting of: increased triple stress tolerance, increased drought stress tolerance, increased nitrogen stress tolerance, increased osmotic stress tolerance, altered ABA response, altered root architecture, increased tiller number, increased yield and increased biomass, the method comprising: (a) introducing into a regenerable plant cell a recombinant DNA construct comprising a polynucleotide operably linked to at least one regulatory sequence, wherein the polynucleotide encodes a polypeptide gives an E-value score of 1E-15 or less when queried using a Profile Hidden Markov Model prepared using SEQ ID NOS:18, 29, 33, 45, 47, 53, 55, 61, 64, 65, 77, 78, 101, 103, 105, 107, 111, 115, 131, 132, 135, 137, 139, 141, 144, 433, 559 and 604, the query being carried out using the hmmsearch algorithm wherein the Z parameter is set to 1 billion; (b) regenerating a transgenic plant from the regenerable plant cell of (a), wherein the transgenic plant comprises in its genome the recombinant DNA construct; and (c) obtaining a progeny plant derived from the transgenic plant of (b), wherein said progeny plant comprises in its genome the recombinant DNA construct and exhibits at least one phenotype selected from the group consisting of: increased triple stress tolerance, increased drought stress tolerance, increased nitrogen stress tolerance, increased osmotic stress tolerance, altered ABA response, altered root architecture, increased tiller number, increased yield and increased biomass, when compared to a control plant not comprising the recombinant DNA construct.

[0401] A method of increasing in a crop plant at least one phenotype selected from the group consisting of: triple stress tolerance, drought stress tolerance, nitrogen stress tolerance, osmotic stress tolerance, ABA response, tiller number, yield and biomass, the method comprising increasing the expression of a carboxyl esterase in the crop plant. In one embodiment, the crop plant is maize. In one embodiment, the carboxylesterase has at least 80% sequence identity, when compared to SEQ ID NO:18, 39, 43, 45, 47, 49, 51,55, 59, 61,64, 65, 66, 95, 97, 101, 103, 107, 111, 113, 117, 119, 121, 123, 127, 129, 130, 131, 132, 135, 627 or 628. In one embodiment, the carboxylesterase is a DTP4 polypeptide disclosed in Table 1 and Table 2 in the current disclosure. In one embodiment, the carboxylesterase gives an E-value score of 1E-15 or less when queried using a Profile Hidden Markov Model prepared using SEQ ID NOS:18, 29, 33, 45, 47, 53, 55, 61, 64, 65, 77, 78, 101, 103, 105, 107, 111, 115, 131, 132, 135, 137, 139, 141, 144, 433, 559 and 604, the query being carried out using the hmmsearch algorithm wherein the Z parameter is set to 1 billion.

[0402] In one embodiment, the carboxylesterase is a polypeptide wherein the polypeptide gives an E-value score of 1E-15 or less when queried using the Profile Hidden Markov Model given in Table 18.

[0403] One embodiment encompasses a method of increasing stress tolerance in a plant, wherein the stress is selected from a group consisting of: drought stress, triple stress, nitrogen stress and osmotic stress, the method comprising:

(a) introducing into a regenerable plant cell a recombinant DNA construct comprising a polynucleotide operably linked to at least one regulatory sequence, wherein the polynucleotide encodes a polypeptide gives an E-value score of 1E-15 or less when queried using a Profile Hidden Markov Model prepared using SEQ ID NOS:18, 29, 33, 45, 47, 53, 55, 61,64, 65, 77, 78, 101, 103, 105, 107, 111, 115, 131,132, 135, 137, 139, 141, 144, 433, 559 and 604, the query being carried out using the hmmsearch algorithm wherein the Z parameter is set to 1 billion; (b) regenerating a transgenic plant from the regenerable plant cell of (a), wherein the transgenic plant comprises in its genome the recombinant DNA construct; and (c) obtaining a progeny plant derived from the transgenic plant of (b), wherein said progeny plant comprises in its genome the recombinant DNA construct and exhibits increased tolerance to at least one stress selected from the group consisting of: drought stress, triple stress, nitrogen stress and osmotic stress, when compared to a control plant not comprising the recombinant DNA construct.

[0404] A method of selecting for (or identifying) an alteration of an agronomic characteristic in a plant, comprising (a) obtaining a transgenic plant, wherein the transgenic plant comprises in its genome a recombinant DNA construct comprising a polynucleotide operably linked to at least one heterologous regulatory sequence (for example, a promoter functional in a plant), wherein said polynucleotide encodes a polypeptide having an amino acid sequence of at least 50%, 51%, 52%, 53%, 54%, 55%, 56%, 57%, 58%, 59%, 60%, 61%, 62%, 63%, 64%, 65%, 66%, 67%, 68%, 69%, 70%, 71%, 72%, 73%, 74%, 75%, 76%, 77%, 78%, 79%, 80%, 81%, 82%, 83%, 84%, 85%, 86%, 87%, 88%, 89%, 90%, 91%, 92%, 93%, 94%, 95%, 96%, 97%, 98%, 99%, or 100% sequence identity, based on the Clustal V or Clustal W method of alignment, when compared to SEQ ID NO:18, 39, 43, 45, 47, 49, 51, 55, 59, 61,64, 65, 66, 95, 97, 101, 103, 107, 111, 113, 117, 119, 121, 123, 127, 129, 130, 131, 132, 135, 627 or 628; (b) obtaining a progeny plant derived from said transgenic plant, wherein the progeny plant comprises in its genome the recombinant DNA construct; and (c) selecting (or identifying) the progeny plant that exhibits an alteration in at least one agronomic characteristic when compared, optionally under at least one stress condition, to a control plant not comprising the recombinant DNA construct. The at least one stress condition may be selected from the group of drought stress, triple stress, nitrogen stress and osmotic stress. The polynucleotide preferably encodes a DTP4 polypeptide. The DTP4 polypeptide preferably has stress tolerance activity, wherein the stress is selected from the group consisting of drought stress, triple stress, nitrogen stress and osmotic stress.

[0405] In another embodiment, a method of selecting for (or identifying) an alteration of at least one agronomic characteristic in a plant, comprising: (a) obtaining a transgenic plant, wherein the transgenic plant comprises in its genome a recombinant DNA construct comprising a polynucleotide operably linked to at least one heterologous regulatory element, wherein said polynucleotide encodes a polypeptide having an amino acid sequence of at least 50%, 51%, 52%, 53%, 54%, 55%, 56%, 57%, 58%, 59%, 60%, 61%, 62%, 63%, 64%, 65%, 66%, 67%, 68%, 69%, 70%, 71%, 72%, 73%, 74%, 75%, 76%, 77%, 78%, 79%, 80%, 81%, 82%, 83%, 84%, 85%, 86%, 87%, 88%, 89%, 90%, 91%, 92%, 93%, 94%, 95%, 96%, 97%, 98%, 99%, or 100% sequence identity, based on the Clustal V or Clustal W method of alignment, when compared to SEQ ID NO:18, 39, 43, 45, 47, 49, 51, 55, 59, 61, 64, 65, 66, 95, 97, 101, 103, 107, 111, 113, 117, 119, 121, 123, 127, 129, 130, 131, 132, 135, 627 or 628, wherein the transgenic plant comprises in its genome the recombinant DNA construct; (b) growing the transgenic plant of part (a) under conditions wherein the polynucleotide is expressed; and (c) selecting (or identifying) the transgenic plant of part (b) that exhibits an alteration of at least one agronomic characteristic when compared to a control plant not comprising the recombinant DNA construct. Optionally, said selecting (or identifying) step (c) comprises determining whether the transgenic plant exhibits an alteration of at least one agronomic characteristic when compared, under at least one condition, to a control plant not comprising the recombinant DNA construct. The at least one agronomic trait may be yield, biomass, or both and the alteration may be an increase. The at least one stress condition may be selected from the group of drought stress, triple stress, nitrogen stress and osmotic stress.

[0406] The at least one agronomic characteristic may be abiotic stress tolerance, greenness, yield, growth rate, biomass, fresh weight at maturation, dry weight at maturation, fruit yield, seed yield, total plant nitrogen content, fruit nitrogen content, seed nitrogen content, nitrogen content in a vegetative tissue, total plant free amino acid content, fruit free amino acid content, seed free amino acid content, free amino acid content in a vegetative tissue, total plant protein content, fruit protein content, seed protein content, protein content in a vegetative tissue, drought tolerance, nitrogen uptake, root lodging, harvest index, stalk lodging, plant height, ear height, ear length, leaf number, tiller number, growth rate, first pollen shed time, first silk emergence time, anthesis silking interval (ASI), stalk diameter, root architecture, staygreen, relative water content, water use, water use efficiency, dry weight of either main plant, tillers, primary ear, main plant and tillers or cobs; rows of kernels, total plant weight·kernel weight, kernel number, salt tolerance, chlorophyll content, flavonol content, number of yellow leaves, early seedling vigor and seedling emergence under low temperature stress. These agronomic characteristics maybe measured at any stage of the plant development. One or more of these agronomic characteristics may be measured under stress or non-stress conditions, and may show alteration on overexpression of the recombinant constructs disclosed herein.

[0407] A method of selecting for (or identifying) an alteration of an agronomic characteristic in a plant, comprising (a) obtaining a transgenic plant, wherein the transgenic plant comprises in its genome a recombinant DNA construct comprising a polynucleotide operably linked to at least one heterologous regulatory element, wherein said polynucleotide comprises a nucleotide sequence, wherein the nucleotide sequence is: (i) hybridizable under stringent conditions with a DNA molecule comprising the full complement of SEQ ID NO:16, 17, 19, 38, 42, 44, 46, 48, 50, 54, 58, 60, 62, 63, 94, 96, 100, 102, 106, 110, 112, 116, 118, 120 or 122; or (ii) derived from SEQ ID NO:16, 17, 19, 38, 42, 44, 46, 48, 50, 54, 58, 60, 62, 63, 94, 96, 100, 102, 106, 110, 112, 116, 118, 120 or 122 by alteration of one or more nucleotides by at least one method selected from the group consisting of: deletion, substitution, addition and insertion; (b) obtaining a progeny plant derived from said transgenic plant, wherein the progeny plant comprises in its genome the recombinant DNA construct; and (c) selecting (or identifying) the progeny plant that exhibits an alteration in at least one agronomic characteristic when compared, optionally under stress conditions, wherein the stress is selected from the group consisting of drought stress, triple stress, nitrogen stress and osmotic stress, to a control plant not comprising the recombinant DNA construct. The polynucleotide preferably encodes a DTP4 polypeptide. The DTP4 polypeptide preferably has stress tolerance activity, wherein the stress is selected from the group consisting of drought stress, triple stress, nitrogen stress and osmotic stress.

[0408] The use of a recombinant DNA construct for producing a plant that exhibits at least one phenotype selected from the group consisting of: increased triple stress tolerance, increased drought stress tolerance, increased nitrogen stress tolerance, increased osmotic stress tolerance, altered ABA response, altered root architecture, increased tiller number, increased yield and increased biomass, when compared to a control plant not comprising said recombinant DNA construct, wherein the recombinant DNA construct comprises a polynucleotide operably linked to at least one heterologous regulatory element, wherein the polynucleotide encodes a polypeptide having an amino acid sequence of at least 70%, 75%, 80%, 85%, 90%, 91%, 92%, 93%, 94%, 95%, 96%, 97%, 98%, 99% or 100% sequence identity, based on the Clustal V or the Clustal W method of alignment, using the respective default parameters, when compared to SEQ ID NO:18, 39, 43, 45, 47, 49, 51, 55, 59, 61, 64, 65, 66, 95, 97, 101, 103, 107, 111, 113, 117, 119, 121, 123, 127, 129, 130, 131, 132, 135, 627 or 628. The polypeptide may be over-expressed in at least one tissue of the plant, or during at least one condition of environmental stress, or both. The plant may be selected from the group consisting of: maize, soybean, sunflower, sorghum, canola, wheat, alfalfa, cotton, rice, barley, millet, sugar cane and switchgrass.

[0409] A method of producing seed (for example, seed that can be sold as a drought tolerant product offering) comprising any of the preceding methods, and further comprising obtaining seeds from said progeny plant, wherein said seeds comprise in their genome said recombinant DNA construct (or suppression DNA construct).

[0410] A method of producing oil or a seed by-product, or both, from a seed, the method comprising extracting oil or a seed by-product, or both, from a seed that comprises a recombinant DNA construct, wherein the recombinant DNA construct comprises a polynucleotide operably linked to at least one heterologous regulatory element, wherein the polynucleotide encodes a polypeptide having an amino acid sequence of at least 70%, 75%, 80%, 85%, 90%, 91%, 92%, 93%, 94%, 95%, 96%, 97%, 98%, 99% or 100% sequence identity, based on the Clustal V or the Clustal W method of alignment, using the respective default parameters, when compared to SEQ ID NO:18, 39, 43, 45, 47, 49, 51, 55, 59, 61,64, 65, 66, 95, 97, 101, 103, 107, 111, 113, 117, 119, 121, 123, 127, 129, 130, 131, 132, 135, 627 or 628. The seed may be obtained from a plant that comprises the recombinant DNA construct, wherein the plant exhibits at least one phenotype selected from the group consisting of: increased triple stress tolerance, increased drought stress tolerance, increased nitrogen stress tolerance, increased osmotic stress tolerance, altered ABA response, altered root architecture, increased tiller number, increased yield and increased biomass, when compared to a control plant not comprising the recombinant DNA construct. The polypeptide may be over-expressed in at least one tissue of the plant, or during at least one condition of abiotic stress, or both. The plant may be selected from the group consisting of: maize, soybean, sunflower, sorghum, canola, wheat, alfalfa, cotton, rice, barley, millet, sugar cane and switchgrass. The oil or the seed by-product, or both, may comprise the recombinant DNA construct.

[0411] Methods of isolating seed oils are well known in the art: (Young et al., Processing of Fats and Oils, In The Lipid Handbook, Gunstone et al., eds., Chapter 5 pp 253 257; Chapman & Hall: London (1994)). Seed by-products include but are not limited to the following: meal, lecithin, gums, free fatty acids, pigments, soap, stearine, tocopherols, sterols and volatiles.

[0412] One may evaluate altered root architecture in a controlled environment (e.g., greenhouse) or in field testing. The evaluation may be under simulated or naturally-occurring low or high nitrogen conditions. The altered root architecture may be an increase in root mass. The increase in root mass may be at least 5%, 6%, 7%, 8%, 9%, 10%, 11%, 12%, 13%, 14%, 15%, 16%, 17%, 18%, 19%, 20%, 21%, 22%, 23%, 24%, 25%, 30%, 35%, 40%, 45% or 50%, when compared to a control plant not comprising the recombinant DNA construct.

[0413] In any of the foregoing methods or any other embodiments of methods of the present disclosure, the step of selecting an alteration of an agronomic characteristic in a transgenic plant, if applicable, may comprise selecting a transgenic plant that exhibits an alteration of at least one agronomic characteristic when compared, under varying environmental conditions, to a control plant not comprising the recombinant DNA construct.

[0414] In any of the foregoing methods or any other embodiments of methods of the present disclosure, the step of selecting an alteration of an agronomic characteristic in a progeny plant, if applicable, may comprise selecting a progeny plant that exhibits an alteration of at least one agronomic characteristic when compared, under varying environmental conditions, to a control plant not comprising the recombinant DNA construct.

[0415] In any of the preceding methods or any other embodiments of methods of the present disclosure, in said introducing step said regenerable plant cell may comprise a callus cell, an embryogenic callus cell, a gametic cell, a meristematic cell, or a cell of an immature embryo. The regenerable plant cells may derive from an inbred maize plant.

[0416] In any of the preceding methods or any other embodiments of methods of the present disclosure, said regenerating step may comprise the following: (i) culturing said transformed plant cells in a media comprising an embryogenic promoting hormone until callus organization is observed; (ii) transferring said transformed plant cells of step (i) to a first media which includes a tissue organization promoting hormone; and (iii) subculturing said transformed plant cells after step (ii) onto a second media, to allow for shoot elongation, root development or both.

[0417] In any of the preceding methods or any other embodiments of methods of the present disclosure, the at least one agronomic characteristic may be selected from the group consisting of: abiotic stress tolerance, greenness, yield, growth rate, biomass, fresh weight at maturation, dry weight at maturation, fruit yield, seed yield, total plant nitrogen content, fruit nitrogen content, seed nitrogen content, nitrogen content in a vegetative tissue, total plant free amino acid content, fruit free amino acid content, seed free amino acid content, free amino acid content in a vegetative tissue, total plant protein content, fruit protein content, seed protein content, protein content in a vegetative tissue, drought tolerance, nitrogen uptake, root lodging, harvest index, stalk lodging, plant height, ear height, ear length, leaf number, tiller number, growth rate, first pollen shed time, first silk emergence time, anthesis silking interval (ASI), stalk diameter, root architecture, staygreen, relative water content, water use, water use efficiency, dry weight of either main plant, tillers, primary ear, main plant and tillers or cobs; rows of kernels, total plant weight·kernel weight, kernel number, salt tolerance, chlorophyll content, flavonol content, number of yellow leaves, early seedling vigor and seedling emergence under low temperature stress. The alteration of at least one agronomic characteristic may be an increase in yield, greenness or biomass.

[0418] In any of the preceding methods or any other embodiments of methods of the present disclosure, the plant may exhibit the alteration of at least one agronomic characteristic when compared, under stress conditions, wherein the stress is selected from the group consisting of drought stress, triple stress, nitrogen stress and osmotic stress, to a control plant not comprising said recombinant DNA construct (or said suppression DNA construct).

[0419] In any of the preceding methods or any other embodiments of methods of the present disclosure, alternatives exist for introducing into a regenerable plant cell a recombinant DNA construct comprising a polynucleotide operably linked to at least one regulatory sequence. For example, one may introduce into a regenerable plant cell a regulatory sequence (such as one or more enhancers, optionally as part of a transposable element), and then screen for an event in which the regulatory sequence is operably linked to an endogenous gene encoding a polypeptide of the instant disclosure.

[0420] The introduction of recombinant DNA constructs of the present disclosure into plants may be carried out by any suitable technique, including but not limited to direct DNA uptake, chemical treatment, electroporation, microinjection, cell fusion, infection, vector-mediated DNA transfer, bombardment, or Agrobacterium-mediated transformation. Techniques for plant transformation and regeneration have been described in International Patent Publication WO 2009/006276, the contents of which are herein incorporated by reference.

[0421] The development or regeneration of plants containing the foreign, exogenous isolated nucleic acid fragment that encodes a protein of interest is well known in the art. The regenerated plants may be self-pollinated to provide homozygous transgenic plants. Otherwise, pollen obtained from the regenerated plants is crossed to seed-grown plants of agronomically important lines. Conversely, pollen from plants of these important lines is used to pollinate regenerated plants. A transgenic plant of the present disclosure containing a desired polypeptide is cultivated using methods well known to one skilled in the art.

### EMBODIMENTS

[0422] 1. A plant comprising in its genome a recombinant DNA construct comprising a polynucleotide operably linked to at least one heterologous regulatory element, wherein said polynucleotide encodes a polypeptide having an amino acid sequence of at least 80%, 81%, 82%, 83%, 84%, 85%, 86%, 87%, 88%, 89%, 90%, 91%, 92%, 93%, 94%, 95%, 96%, 97%, 98%, 99%, or 100% sequence identity, when compared to SEQ ID NO:18, 39, 43, 45, 47, 49, 51, 55, 59, 61,64, 65, 66, 95, 97, 101, 103, 107, 111, 113, 117, 119, 121, 123, 127, 129, 130, 131, 132, 135, 627 or 628, and wherein said plant exhibits at least one phenotype selected from the group consisting of: increased triple stress tolerance, increased drought stress tolerance, increased nitrogen stress tolerance, increased osmotic stress tolerance, altered ABA response, altered root architecture, and increased tiller number, when compared to a control plant not comprising said recombinant DNA construct.

[0423] 2. A plant comprising in its genome a recombinant DNA construct comprising a polynucleotide operably linked to at least one heterologous regulatory element, wherein said polynucleotide encodes a polypeptide having an amino acid sequence of at least 80%, 81%, 82%, 83%, 84%, 85%, 86%, 87%, 88%, 89%, 90%, 91%, 92%, 93%, 94%, 95%, 96%, 97%, 98%, 99%, or 100% sequence identity, when compared to SEQ ID NO:18, 39, 43, 45, 47, 49, 51, 55, 59, 61,64, 65, 66, 95, 97, 101, 103, 107, 111, 113, 117, 119, 121, 123, 127, 129, 130, 131, 132, 135, 627 or 628, and wherein said plant exhibits an increase in yield, biomass, or both, when compared to a control plant not comprising said recombinant DNA construct.

[0424] 3. The plant of embodiment 2, wherein said plant exhibits said increase in yield, biomass, or both when compared, under water limiting conditions, to said control plant not comprising said recombinant DNA construct.

[0425] 4. The plant of any one of embodiments 1 to 3, wherein said plant is selected from the group consisting of: Arabidopsis, maize, soybean, sunflower, sorghum, canola, wheat, alfalfa, cotton, rice, barley, millet, sugar cane and switchgrass.

[0426] 5. Seed of the plant of any one of embodiments 1 to 4, wherein said seed comprises in its genome a recombinant DNA construct comprising a polynucleotide operably linked to at least one heterologous regulatory element, wherein said polynucleotide encodes a polypeptide having an amino acid sequence of at least 80%, 81%, 82%, 83%, 84%, 85%, 86%, 87%, 88%, 89%, 90%, 91%, 92%, 93%, 94%, 95%, 96%, 97%, 98%, 99%, or 100% sequence identity, when compared to SEQ ID NO:18, 39, 43, 45, 47, 49, 51, 55, 59, 61,64, 65, 66, 95, 97, 101, 103, 107, 111, 113, 117, 119, 121, 123, 127, 129, 130, 131, 132, 135, 627 or 628, and wherein a plant produced from said seed exhibits an increase in at least one phenotype selected from the group consisting of: drought stress tolerance, triple stress tolerance, osmotic stress tolerance, nitrogen stress tolerance, tiller number, yield and biomass, when compared to a control plant not comprising said recombinant DNA construct.

[0427] 6. A method of increasing stress tolerance in a plant, wherein the stress is selected from a group consisting of: drought stress, triple stress, nitrogen stress and osmotic stress, the method comprising:
[0428] (a) introducing into a regenerable plant cell a recombinant DNA construct comprising a polynucleotide operably linked to at least one heterologous regulatory sequence, wherein the polynucleotide encodes a polypeptide having an amino acid sequence of at least 80%, 81%, 82%, 83%, 84%, 85%, 86%, 87%, 88%, 89%, 90%, 91%, 92%, 93%, 94%, 95%, 96%, 97%, 98%, 99%, or 100% sequence identity, when compared to SEQ ID NO:18, 39, 43, 45, 47, 49, 51, 55, 59, 61, 64, 65, 66, 95, 97, 101, 103, 107, 111, 113, 117, 119, 121, 123, 127, 129, 130, 131, 132, 135, 627 or 628;
[0429] (b) regenerating a transgenic plant from the regenerable plant cell of (a), wherein the transgenic plant comprises in its genome the recombinant DNA construct; and
[0430] (c) obtaining a progeny plant derived from the transgenic plant of (b), wherein said progeny plant comprises in its genome the recombinant DNA construct and exhibits increased tolerance to at least one stress selected from the group consisting of drought stress, triple stress, nitrogen stress and osmotic stress, when compared to a control plant not comprising the recombinant DNA construct.

[0431] 7. A method of selecting for increased stress tolerance in a plant, wherein the stress is selected from a group consisting of: drought stress, triple stress, nitrogen stress and osmotic stress, the method comprising:
[0432] (a) obtaining a transgenic plant, wherein the transgenic plant comprises in its genome a recombinant DNA construct comprising a polynucleotide operably linked to at least one heterologous regulatory element, wherein said polynucleotide encodes a polypeptide having an amino acid sequence of at least 80%, 81%, 82%, 83%, 84%, 85%, 86%, 87%, 88%, 89%, 90%, 91%, 92%, 93%, 94%, 95%, 96%, 97%, 98%, 99%, or 100% sequence identity, when compared to SEQ ID NO:18, 39, 43, 45, 47, 49, 51,55, 59, 61,64, 65, 66, 95, 97, 101, 103, 107, 111, 113, 117, 119, 121, 123, 127, 129, 130, 131, 132, 135, 627 or 628;
[0433] (b) growing the transgenic plant of part (a) under conditions wherein the polynucleotide is expressed; and
[0434] (c) selecting the transgenic plant of part (b) with increased stress tolerance, wherein the stress is selected from the group consisting of: drought stress, triple stress, nitrogen stress and osmotic stress, when compared to a control plant not comprising the recombinant DNA construct.

[0435] 8. A method of selecting for an alteration of yield, biomass, or both in a plant, comprising:
[0436] (a) obtaining a transgenic plant, wherein the transgenic plant comprises in its genome a recombinant DNA construct comprising a polynucleotide operably linked to at least one regulatory element, wherein said polynucleotide encodes a polypeptide having an amino acid sequence of at least 80%, 81%, 82%, 83%, 84%, 85%, 86%, 87%, 88%, 89%, 90%, 91%, 92%, 93%, 94%, 95%, 96%, 97%, 98%, 99%, or 100% sequence identity, when compared to SEQ ID NO:18, 39, 43, 45, 47, 49, 51,55, 59, 61,64, 65, 66, 95, 97, 101, 103, 107, 111, 113, 117, 119, 121, 123, 127, 129, 130, 131, 132, 135, 627 or 628;
[0437] (b) growing the transgenic plant of part (a) under conditions wherein the polynucleotide is expressed; and
[0438] (c) selecting the transgenic plant of part (b) that exhibits an alteration of yield, biomass or both when compared to a control plant not comprising the recombinant DNA construct.

[0439] 9. The method of embodiment 8, wherein said selecting step (c) comprises determining whether the transgenic plant of (b) exhibits an alteration of yield, biomass or both when compared, under water limiting conditions, to a control plant not comprising the recombinant DNA construct.

[0440] 10. The method of embodiment 8 or embodiment 9, wherein said alteration is an increase.

[0441] 11. The method of any one of embodiments 6 to 10, wherein said plant is selected from the group consisting of: Arabidopsis, maize, soybean, sunflower, sorghum, canola, wheat, alfalfa, cotton, rice, barley, millet, sugar cane and switchgrass.

[0442] 12. An isolated polynucleotide comprising:
[0443] (a) a nucleotide sequence encoding a polypeptide with stress tolerance activity, wherein the stress is selected from a group consisting of drought stress, triple stress, nitrogen stress and osmotic stress, and wherein the polypeptide has an amino acid sequence of at least 95%, 96%, 97%, 98%, 99% or 100% sequence identity when compared to SEQ ID NO:18, 39, 43, 45, 47, 49, 51, 55, 59, 61, 64, 65, 66, 95, 97, 101, 103, 107, 111, 113, 117, 119, 121, 123, 127, 129, 130, 131, 132, 135, 627 or 628; or
[0444] (b) the full complement of the nucleotide sequence of (a).

[0445] 13. The polynucleotide of embodiment 12, wherein the amino acid sequence of the polypeptide comprises less than 100% sequence identity to SEQ ID NO:18, 39, 43, 45, 47, 49, 51, 55, 59, 61, 64, 65, 66, 95, 97, 101, 103, 107, 111, 113, 117, 119, 121, 123, 127, 129, 130, 131, 132, 135, 627 or 628.

[0446] 14. The polynucleotide of embodiment 12 wherein the nucleotide sequence comprises SEQ ID NO:16, 17, 19, 38, 42, 44, 46, 48, 50, 54, 58, 60, 62, 63, 94, 96, 100, 102, 106, 110, 112, 116, 118, 120 or 122.

[0447] 15. A plant or seed comprising a recombinant DNA construct, wherein the recombinant DNA construct comprises the polynucleotide of any one of embodiments 12 to 14 operably linked to at least one heterologous regulatory sequence.

[0448] 16. A plant comprising in its genome an endogenous polynucleotide operably linked to at least one heterologous regulatory element, wherein said endogenous polynucleotide encodes a polypeptide having an amino acid sequence of at least 80%, 81%, 82%, 83%, 84%, 85%, 86%, 87%, 88%, 89%, 90%, 91%, 92%, 93%, 94%, 95%, 96%, 97%, 98%, 99%, or 100% sequence identity, when compared to SEQ ID NO:18, 39, 43, 45, 47, 49, 51, 55, 59, 61,64, 65, 66, 95, 97, 101, 103, 107, 111, 113, 117, 119, 121, 123, 127, 129, 130, 131, 132, 135, 627 or 628, and wherein said plant exhibits at least one phenotype selected from the group consisting of increased triple stress tolerance, increased drought stress tolerance, increased nitrogen stress tolerance, increased osmotic stress tolerance, altered ABA response, altered root architecture, increased tiller number, when compared to a control plant not comprising the heterologous regulatory element.

[0449] 17. A method of increasing in a crop plant at least one phenotype selected from the group consisting of: triple stress tolerance, drought stress tolerance, nitrogen stress tolerance, osmotic stress tolerance, ABA response, tiller number, yield and biomass, the method comprising increasing the expression of a carboxyl esterase in the crop plant.

[0450] 18. The method of embodiment 17, wherein the crop plant is maize.

[0451] 19. The method of embodiment 17 or embodiment 18, wherein the carboxyl esterase has at least 80%, 81%, 82%, 83%, 84%, 85%, 86%, 87%, 88%, 89%, 90%, 91%, 92%, 93%, 94%, 95%, 96%, 97%, 98%, 99%, or 100% sequence identity, when compared to SEQ ID NO:18, 39, 43, 45, 47, 49, 51, 55, 59, 61, 64, 65, 66, 95, 97, 101, 103, 107, 111, 113, 117, 119, 121, 123, 127, 129, 130, 131, 132, 135, 627 or 628. The carboxyl esterase may comprise at least one of the elements present in consensus SEQ ID NO:630 selected from the group consisting of: a conserved “nucleophile elbow” (G×S×G), a conserved catalytic triad of S-H-D and a “oxyanion hole” with the conserved residues G-G-G.

[0452] 20. The method of embodiment 17 or embodiment 18, wherein the carboxylesterase gives an E-value score of 1E-15 or less when queried using a Profile Hidden Markov Model prepared using SEQ ID NOS:18, 29, 33, 45, 47, 53, 55, 61, 64, 65, 77, 78, 101, 103, 105, 107, 111, 115, 131, 132, 135, 137, 139, 141, 144, 433, 559 and 604, the query being carried out using the hmmsearch algorithm wherein the Z parameter is set to 1 billion.

[0453] 21. A recombinant DNA construct comprising a polynucleotide, wherein the polynucleotide is operably linked to a heterologous promoter, and encodes a polypeptide with at least one activity selected from the group consisting of: carboxylesterase, increased triple stress tolerance, increased drought stress tolerance, increased nitrogen stress tolerance, increased osmotic stress tolerance, altered ABA response, altered root architecture, increased tiller number, wherein the polypeptide gives an E-value score of 1E-15 or less when queried using a Profile Hidden Markov Model prepared using SEQ ID NOS:18, 29, 33, 45, 47, 53, 55, 61, 64, 65, 77, 78, 101, 103, 105, 107, 111, 115, 131, 132, 135, 137, 139, 141, 144, 433, 559 and 604, the query being carried out using the hmmsearch algorithm wherein the Z parameter is set to 1 billion.

[0454] 22. A plant comprising the recombinant construct of embodiment 21, wherein the plant exhibits increased yield, biomass, or both, when compared to a plant not comprising the recombinant construct.

[0455] 23. A method of making a plant, that exhibits at least one phenotype selected from the group consisting of: increased triple stress tolerance, increased drought stress tolerance, increased nitrogen stress tolerance, increased osmotic stress tolerance, altered ABA response, altered root architecture, increased tiller number, the method comprising:
[0456] (a) introducing into a regenerable plant cell the recombinant DNA construct of embodiment 21;
[0457] (b) regenerating a transgenic plant from the regenerable plant cell of (a), wherein the transgenic plant comprises in its genome the recombinant DNA construct; and
[0458] (c) obtaining a progeny plant derived from the transgenic plant of (b), wherein said progeny plant comprises in its genome the recombinant DNA construct of embodiment 21 and exhibits at least one phenotype selected from the group consisting of: increased triple stress tolerance, increased drought stress tolerance, increased nitrogen stress tolerance, increased osmotic stress tolerance, altered ABA response, altered root architecture, increased tiller number, when compared to a control plant not comprising the recombinant DNA construct.

[0459] 24. A method of increasing stress tolerance in a plant, wherein the stress is selected from a group consisting of: drought stress, triple stress, nitrogen stress and osmotic stress, the method comprising:
[0460] (a) introducing into a regenerable plant cell the recombinant DNA construct of embodiment 21;
[0461] (b) regenerating a transgenic plant from the regenerable plant cell of (a), wherein the transgenic plant comprises in its genome the recombinant DNA construct; and
[0462] (c) obtaining a progeny plant derived from the transgenic plant of (b), wherein said progeny plant comprises in its genome the recombinant DNA construct of embodiment 21 and exhibits increased tolerance to at least one stress selected from the group consisting of: drought stress, triple stress, nitrogen stress and osmotic stress, when compared to a control plant not comprising the recombinant DNA construct.

[0463] 25. A method of making a plant that exhibits at least one phenotype selected from the group consisting of: increased triple stress tolerance, increased drought stress tolerance, increased nitrogen stress tolerance, increased osmotic stress tolerance, altered ABA response, altered root architecture, increased tiller number, increased yield and increased biomass, when compared to a control plant, the method comprising the steps of introducing into a plant a recombinant DNA construct comprising a polynucleotide operably linked to at least one heterologous regulatory element, wherein said polynucleotide encodes a polypeptide having an amino acid sequence of at least 80%, 81%, 82%, 83%, 84%, 85%, 86%, 87%, 88%, 89%, 90%, 91%, 92%, 93%, 94%, 95%, 96%, 97%, 98%, 99%, or 100% sequence identity, when compared to SEQ ID NO:18, 39, 43, 45, 47, 49, 51, 55, 59, 61, 64, 65, 66, 95, 97, 101, 103, 107, 111, 113, 117, 119, 121, 123, 127, 129, 130, 131, 132, 135, 627 or 628.

[0464] 26. A method of producing a plant that exhibits at least one trait selected from the group consisting of: increased triple stress tolerance, increased drought stress tolerance, increased nitrogen stress tolerance, increased osmotic stress tolerance, altered ABA response, altered root architecture, increased tiller number, increased yield and increased biomass, wherein the method comprises growing a plant from a seed comprising a recombinant DNA construct, wherein the recombinant DNA construct comprises a polynucleotide operably linked to at least one heterologous regulatory element, wherein the polynucleotide encodes a polypeptide having an amino acid sequence of at least 80%, 81%, 82%, 83%, 84%, 85%, 86%, 87%, 88%, 89%, 90%, 91%, 92%, 93%, 94%, 95%, 96%, 97%, 98%, 99%, or 100% sequence identity, when compared to SEQ ID NO:18, 39, 43, 45, 47, 49, 51, 55, 59, 61, 64, 65, 66, 95, 97, 101, 103, 107, 111, 113, 117, 119, 121, 123, 127, 129, 130, 131, 132, 135, 627 or 628, wherein the plant exhibits at least one phenotype selected from the group consisting of: increased triple stress tolerance, increased drought stress tolerance, increased nitrogen stress tolerance, increased osmotic stress tolerance, altered ABA response, altered root architecture, increased tiller number, increased yield and increased biomass, when compared to a control plant not comprising the recombinant DNA construct.

[0465] 27. A method of producing a seed, the method comprising the following:
[0466] (a) crossing a first plant with a second plant, wherein at least one of the first plant and the second plant comprises a recombinant DNA construct, wherein the recombinant DNA construct comprises a polynucleotide operably linked to at least one heterologous regulatory element, wherein the polynucleotide encodes a polypeptide having an amino acid sequence of at least 80%, 81%, 82%, 83%, 84%, 85%, 86%, 87%, 88%, 89%, 90%, 91%, 92%, 93%, 94%, 95%, 96%, 97%, 98%, 99%, or 100% sequence identity, when compared to SEQ ID NO:18, 39, 43, 45, 47, 49, 51,55, 59, 61,64, 65, 66, 95, 97, 101, 103, 107, 111, 113, 117, 119, 121, 123, 127, 129, 130, 131, 132, 135, 627 or 628; and
[0467] (b) selecting a seed of the crossing of step (a), wherein the seed comprises the recombinant DNA construct.

[0468] 28. The method of embodiment 27, wherein a plant grown from the seed of part (b) exhibits at least one phenotype selected from the group consisting of: increased triple stress tolerance, increased drought stress tolerance, increased nitrogen stress tolerance, increased osmotic stress tolerance, altered ABA response, altered root architecture, increased tiller number, increased yield and increased biomass, when compared to a control plant not comprising the recombinant DNA construct.

[0469] 29. A method of producing oil or a seed by-product, or both, from a seed, the method comprising extracting oil or a seed by-product, or both, from a seed that comprises a recombinant DNA construct, wherein the recombinant DNA construct comprises a polynucleotide operably linked to at least one heterologous regulatory element, wherein the polynucleotide encodes a polypeptide having an amino acid sequence of at least 80%, 81%, 82%, 83%, 84%, 85%, 86%, 87%, 88%, 89%, 90%, 91%, 92%, 93%, 94%, 95%, 96%, 97%, 98%, 99%, or 100% sequence identity, when compared to SEQ ID NO:18, 39, 43, 45, 47, 49, 51, 55, 59, 61,64, 65, 66, 95, 97, 101, 103, 107, 111, 113, 117, 119, 121, 123, 127, 129, 130, 131, 132, 135, 627 or 628.

[0470] 30. The method of embodiment 29, wherein the seed is obtained from a plant that comprises the recombinant DNA construct and exhibits at least one trait selected from the group consisting of: increased triple stress tolerance, increased drought stress tolerance, increased nitrogen stress tolerance, increased osmotic stress tolerance, altered ABA response, altered root architecture, increased tiller number, increased yield and increased biomass, when compared to a control plant not comprising the recombinant DNA construct.

[0471] 31. The method of embodiment 29 or embodiment 30, wherein the oil or the seed by-product, or both, comprises the recombinant DNA construct.

[0472] 32. A plant comprising in its genome a recombinant DNA construct comprising a polynucleotide operably linked to at least one heterologous regulatory element, wherein said polynucleotide encodes a polypeptide having an amino acid sequence of at least 95% sequence identity, when compared to SEQ ID NO:18, and wherein said plant exhibits at least one phenotype selected from the group consisting of: increased triple stress tolerance, increased drought stress tolerance, increased nitrogen stress tolerance, increased osmotic stress tolerance, altered ABA response, altered root architecture, increased tiller number, increased yield and increased biomass, when compared to a control plant not comprising said recombinant DNA construct. The amino acid sequence of the polypeptide may have less than 100% sequence identity to SEQ ID NO:18.

[0473] 33. A method of making a plant that exhibits at least one phenotype selected from the group consisting of: increased triple stress tolerance, increased drought stress tolerance, increased nitrogen stress tolerance, increased osmotic stress tolerance, altered ABA response, altered root architecture, increased tiller number, increased yield and increased biomass, when compared to a control plant, the method comprising the steps of introducing into a plant a recombinant DNA construct comprising a polynucleotide operably linked to at least one heterologous regulatory element, wherein said polynucleotide encodes a polypeptide having an amino acid sequence of at least 95% sequence identity, when compared to SEQ ID NO:18. The amino acid sequence of the polypeptide may have less than 100% sequence identity to SEQ ID NO:18.

[0474] In any of the above embodiments 1-33, the polypeptide may comprise at least one of the elements present in consensus SEQ ID NO:630 selected from the group consisting of: a conserved “nucleophile elbow” (G×S×G), a conserved catalytic triad of S-H-D and a “oxyanion hole” with the conserved residues G-G-G.

### EXAMPLES

[0475] The present disclosure is further illustrated in the following Examples, in which parts and percentages are by weight and degrees are Celsius, unless otherwise stated. It should be understood that these Examples, while indicating embodiments of the disclosure, are given by way of illustration only. From the above discussion and these Examples, one skilled in the art can ascertain the essential characteristics of this disclosure, and without departing from the spirit and scope thereof, can make various changes and modifications of the disclosure to adapt it to various usages and conditions. Thus, various modifications of the disclosure in addition to those shown and described herein will be apparent to those skilled in the art from the foregoing description. Such modifications are also intended to fall within the scope of the appended claims.

### Example 1

### Creation of an Arabidopsis Population with Activation-Tagged Genes

[0476] Arabidopsis activation-tagged populations were created using known methods. The resulting T1 seed were sown on soil, and transgenic seedlings were selected by spraying with glufosinate (Finale®; AgrEvo; Bayer Environmental Science). A total of 100,000 glufosinate resistant T1 seedlings were selected. T2 seed from each line was kept separate.

### Example 2

### Screens to Identify Lines with Enhanced Drought Tolerance

[0477] Activation-tagged lines can be subjected to a quantitative drought stress screen (PCT Publication No. WO/2012/058528). Lines with a significant delay in yellow color accumulation and/or with significant maintenance of rosette leaf area, when compared to the average of the whole flat, are designated as Phase 1 hits. Phase 1 hits are re-screened in duplicate under the same assay conditions. When either or both of the Phase 2 replicates show a significant difference (score of greater than 0.9) from the whole flat mean, the line is then considered a validated drought tolerant line.

### Example 3

### Screen to Identify Lines with Enhanced ABA Hypersensitivity

[0478] The activation tagged lines described in Example 1 can be subjected to independent ABA sensitivity screens. The screen is done as described in International Patent Application No. PCT/US12/62374.

[0479] Screening of transgenic plant lines is done on medium supplemented with low concentration of ABA.

[0480] Wild-type and most of transgenic seeds display consistent germination profiles with 0.6 μM ABA. Therefore 0.6 μM ABA is used for phase 1 mutant screen.

[0481] Germination is scored as the emergence of radicle over a period of 3 days. Seeds are counted manually using a magnifying lens. The data is analyzed as percentage germination to the total number of seeds that were inoculated. The germination curves are plotted. Like wild-type, most of the transgenic lines have >90% of germination rate at Day 3. Therefore for a line to qualify as outlier, it has to show a significantly lower germination rate (<75%) at Day 3. Usually the cutoff value (75% germination rate) is at least four SD away from the average value of the 96 lines. Data for germination count of all lines and their graphs at 48 hrs, 72 hrs is documented.

### Example 4

### Identification of Activation-Tagged AT-DTP4 Polypeptide Gene from the Drought Tolerant Activation-Tagged Line

[0482] An activation-tagged line (No. 121463) showing drought tolerance was further analyzed. DNA from the line was extracted, and genes flanking the insert in the mutant line were identified using SAIFF PCR (Siebert et al., Nucleic Acids Res. 23:1087-1088 (1995)). A PCR amplified fragment was identified that contained T-DNA border sequence and Arabidopsis genomic sequence. Genomic sequence flanking the insert was obtained, and the candidate gene was identified by alignment to the completed Arabidopsis genome. For a given integration event, the annotated gene nearest the 35S enhancer elements/insert was the candidate for gene that is activated in the line. In the case of line 121463, the gene nearest the 35S enhancers at the integration site was At5g62180 (SEQ ID NO:16; NCBI GI No. 30697645), encoding a DTP4 polypeptide (SEQ ID NO:18; NCBI GI No. 75180635).

### Example 5

### Identification of Activation-Tagged AT-DTP4 Polypeptide Gene from the Activation-Tagged Line Showing ABA-Hypersensitivity

[0483] An activation-tagged line (No. 990013; 35S0059G11) showing ABA-hypersensitivity was further analyzed. DNA from the line was extracted, and genes flanking the insert in the mutant line were identified using SAIFF PCR (Siebert et al., Nucleic Acids Res. 23:1087-1088 (1995)). A PCR amplified fragment was identified that contained T-DNA border sequence and Arabidopsis genomic sequence. Genomic sequence flanking the insert was obtained, and the candidate gene was identified by alignment to the completed Arabidopsis genome. For a given integration event, the annotated gene nearest the 35S enhancer elements/junction was the candidate for gene that is activated in the line. In the case of line 990013, the gene nearest the 35S enhancers at the integration site was At5g62180 (SEQ ID NO:16; NCBI GI No. 30697645), encoding a DTP4 polypeptide (SEQ ID NO:18; NCBI GI No. 75180635).

### Example 6

### Validation of Arabidopsis Candidate Gene At5g62180 (AT-DTP4 Polypeptide) for Drought Tolerance

[0484] Candidate genes can be transformed into Arabidopsis and overexpressed under the 35S promoter (PCT Publication No. WO/2012/058528). If the same or similar phenotype is observed in the transgenic line as in the parent activation-tagged line, then the candidate gene is considered to be a validated “lead gene” in Arabidopsis.

[0485] The candidate Arabidopsis DTP4 polypeptide gene (At5g62180; SEQ ID NO:16; NCBI GI No. 30697645) was tested for its ability to confer drought tolerance.

[0486] The candidate gene was cloned behind the 35S promoter in pBC-yellow to create the 35S promoter::At5g62180 expression construct, pBC-Yellow-At5g62180.

[0487] Transgenic T1 seeds were selected by yellow fluorescence, and T1 seeds were plated next to wild-type seeds and grown under water limiting conditions. Growth conditions and imaging analysis were as described in Example 2. It was found that the original drought tolerance phenotype from activation tagging could be recapitulated in wild-type Arabidopsis plants that were transformed with a construct where At5g62180 was directly expressed by the 35S promoter. The drought tolerance score, as determined by the method of PCT Publication No. WO/2012/058528, was 1.35.

### Example 7

### Validation of Arabidopsis Candidate Gene At5g62180 (AT-DTP4 Polypeptide) for ABA-Hypersensitivity Via Transformation into Arabidopsis

[0488] The candidate Arabidopsis DTP4 polypeptide gene (At5g62180; SEQ ID NO:16; NCBI GI No. 30697645) was tested for its ability to confer ABA-hypersensitivity in the following manner.

[0489] The At5g62180 cDNA protein-coding region was synthesized and cloned into the transformation vector.

[0490] Transgenic T1 seeds were selected, and used for the germination assay as described below. It was found that the original ABA hypersensitivity phenotype could be recapitulated in wild-type Arabidopsis plants that were transformed with a construct where At5g62180 was directly expressed by the 35S promoter.

### Assay Conditions:

[0491] Seeds were surface sterilized and stratified for 96 hrs. About 100 seeds were inoculated in one plate and stratified for 96 hrs, then cultured in a growth chamber programmed for 16 h of light at 22° C. temperature and 50% relative humidity. Germination was scored as the emergence of radicle.

### Observations and Results:

[0492] Germination was scored as the emergence of radicle in ½ MS media and 1 μM ABA over a period of 4 days. Seeds were counted manually using a magnifying lens. The data was analyzed as percentage germination to the total number of seeds that were inoculated. The cut-off value was at least 2 StandDev below control. The germination curves were plotted. Wild-type col-0 plants had >90% of germination rate at Day 3. The line with pBC-yellow-At5g62180 showed <75% germination on Day 3, as shown in FIG. 4.

### Example 8

### Characterization of cDNA Clones Encoding DTP4 Polypeptides

[0493] cDNA libraries representing mRNAs from various tissues of Zea mays, Dennstaedtia punctilobula, Sesbania bispinosa, Artemisia tridentata, Lamium amplexicaule, Delosperma nubigenum, Peperomia caperata, and other plant species were prepared and cDNA clones encoding DTP4 polypeptides were identified.

[0494] Table 3 gives additional information about some of the other DTP4 polypeptides disclosed herein.

TABLE 3
Description of Some DTP4 Polypeptides

| SEQ ID NO | | |
|---|---|---|
| (aa | | |
| sequence) | Contig | Description |
| 119 | Bn_Bo | assembled contig from |
| | | Brassica napus and Brassica |
| | | oleracea ESTs |
| 121 | Bole_someBnap_prot | assembled contig from |
| | | Brassica napus and Brassica |
| | | oleracea ESTs |
| 123 | B-napus_2-1 | assembled contig from more |
| | | than one Brassica napus ESTs |
| 125 | Csinensis plus | assembled contig from Citrus |
| | | sinensis and Citrus clementina |
| 137 | GSVIVT01027568001; | Vitis vinifera |
| 139 | GSVIVT01027566001 | Vitis vinifera |
| 141 | GSVIVT01027569001 | Vitis vinifera |

[0495] The BLAST search using the AT-DTP4 polypeptide and maize sequences from clones listed in Table 1 revealed similarity of the polypeptides encoded by the cDNAs to the DTP4 polypeptides from various organisms. As shown in Table 1, Table 2 and FIG. 1, certain cDNAs encoded polypeptides similar to DTP4 polypeptide from Arabidopsis (GI No. 75180635; SEQ ID NO:18). Shown in Table 4 and Table 5 (patent literature) are the BLAST results for some of the DTP4 polypeptides disclosed herein, that are one or more of the following: individual Expressed Sequence Tag (“EST”), the sequences of the entire cDNA inserts comprising the indicated cDNA clones (“Full-Insert Sequence” or “FIS”), the sequences of contigs assembled from two or more EST, FIS or PCR sequences (“Contig”), or sequences encoding an entire or functional protein derived from an FIS or a contig (“Complete Gene Sequence” or “CGS”). Also shown in Table 4 and 5 are the percent sequence identity values for each pair of amino acid sequences using the Clustal V method of alignment with default parameters.

TABLE 4
BLASTP Results for DTP4 polypeptides

| | | | BLASTP | Percent |
|---|---|---|---|---|
| Sequence | | NCBI GI No. | pLog of | Sequence |
| (SEQ ID NO) | Status | (SEQ ID NO) | E-value | Identity |
| cfp2n.pk010.p21 | FIS | 194704970 | >180 | 100 |
| (SEQ ID NO: 21) | | (SEQ ID NO: 82) | | |
| cfp2n.pk070.m7 | FIS | 195636334 | >180 | 100 |
| (SEQ ID NO: 23) | | (SEQ ID NO: 84) | | |
| cfp3n.pk007.i9 | FIS | 194707422 | >180 | 99.7 |
| (SEQ ID NO: 25) | | (SEQ ID NO: 86) | | |
| pco524093 | CGS | 223948401 | >180 | 100 |
| (SEQ ID NO: 27) | | (SEQ ID NO: 88) | | |
| Maize_DTP4-1 | CGS | 194704970 | >180 | 100 |
| (SEQ ID NO: 29) | | (SEQ ID NO: 82) | | |
| Maize_DTP4-2 | CGS | 23495723 | >180 | 68.2 |
| (SEQ ID NO: 31) | | (SEQ ID NO: 90) | | |
| Maize_DTP4-3 | CGS | 215768720 | >180 | 73.6 |
| (SEQ ID NO: 33) | | (SEQ ID NO: 92) | | |

TABLE 5
BLASTP Results for DTP4 polypeptides

| | | | BLASTP | Percent |
|---|---|---|---|---|
| Sequence | | Reference | pLog of | Sequence |
| (SEQ ID NO) | Status | (SEQ ID NO) | E-value | Identity |
| At5g62180 | CGS | SEQ ID NO: 12 of | >180 | 100 |
| | | U.S. Pat. No. | | |
| | | 7,915,050 | | |
| | | (SEQ ID NO: 81) | | |
| cfp2n.pk010.p21 | FIS | SEQ ID NO: | >180 | 97.6 |
| (SEQ ID NO: 21) | | 260345 | | |
| | | of US20120216318 | | |
| | | (SEQ ID NO: 83) | | |
| cfp2n.pk070.m7 | FIS | SEQ ID NO: | >180 | 100 |
| (SEQ ID NO: 23) | | 331675 | | |
| | | of US20120216318 | | |
| | | (SEQ ID NO: 85) | | |
| cfp3n.pk007.i9 | FIS | SEQ ID NO: 7332 | >180 | 97.6 |
| (SEQ ID NO: 25) | | of U.S. Pat. No. | | |
| | | 8,343,764 | | |
| | | (SEQ ID NO: 87) | | |
| pco524093 | CGS | SEQ ID NO: 16159 | >180 | 100 |
| (SEQ ID NO: 27) | | of U.S. Pat. No. | | |
| | | 7,569,389 | | |
| | | (SEQ ID NO: 89) | | |
| Maize_DTP4-1 | CGS | SEQ ID NO: | >180 | 97.6 |
| (SEQ ID NO: 29) | | 260345 | | |
| | | of US20120216318 | | |
| | | (SEQ ID NO: 83) | | |
| Maize_DTP4-2 | CGS | SEQ ID NO: 50819 | >180 | 100 |
| (SEQ ID NO: 31) | | of US20120017292 | | |
| | | (SEQ ID NO: 91) | | |
| Maize_DTP4-3 | CGS | SEQ ID NO: 10044 | >180 | 90 |
| (SEQ ID NO: 33) | | of U.S. Pat. No. | | |
| | | 8,362,325 | | |
| | | (SEQ ID NO: 93) | | |

[0496] FIG. 1A-FIG. 1G show the alignment of the DTP4 polypeptides which were tested in ABA sensitivity assays (SEQ ID NOS:18, 39, 43, 45, 47, 49, 51, 55, 59, 61, 64, 65, 66, 95, 97, 99, 101, 103, 107, 111, 113, 117, 119, 121,123, 127, 129, 130, 131, 132, 135, 627 and 628). Residues that are identical to the residue of consensus sequence (SEQ ID NO:630) at a given position are enclosed in a box. A consensus sequence is presented where a residue is shown if identical in all sequences, otherwise, a period is shown.

[0497] FIG. 2 shows the percent sequence identity and the divergence values for each pair of amino acids sequences of DTP4 polypeptides displayed in FIG. 1A-1G.

[0498] Sequence alignments and percent identity calculations were performed using the Megalign® program of the LASERGENE® bioinformatics computing suite (DNASTAR® Inc., Madison, Wis.). Multiple alignment of the sequences was performed using the Clustal V method of alignment (Higgins and Sharp (1989) CABIOS. 5:151-153) with the default parameters (GAP PENALTY=10, GAP LENGTH PENALTY=10). Default parameters for pairwise alignments using the Clustal method were KTUPLE=1, GAP PENALTY=3, WINDOW=5 and DIAGONALS SAVED=5.

[0499] Sequence alignments and BLAST scores and probabilities indicate that the nucleic acid fragments comprising the instant cDNA clones encode DTP4 polypeptides.

### Example 9

### Preparation of a Plant Expression Vector Containing a Homolog to the Arabidopsis Lead Gene

[0500] Sequences homologous to the Arabidopsis AT-DTP4 polypeptide can be identified using sequence comparison algorithms such as BLAST (Basic Local Alignment Search Tool; Altschul et al., J. Mol. Biol. 215:403-410 (1993); see also the explanation of the BLAST algorithm on the world wide web site for the National Center for Biotechnology Information at the National Library of Medicine of the National Institutes of Health). Sequences encoding homologous DTP4 polypeptides can be PCR-amplified by any of the following methods.

[0501] Method 1 (RNA-based): If the 5′ and 3′ sequence information for the protein-coding region, or the 5′ and 3′ UTR, of a gene encoding a DTP4 polypeptide homolog is available, gene-specific primers can be designed as outlined in Example 5. RT-PCR can be used with plant RNA to obtain a nucleic acid fragment containing the protein-coding region flanked by attB1 (SEQ ID NO:10) and attB2 (SEQ ID NO:11) sequences. The primer may contain a consensus Kozak sequence (CAACA) upstream of the start codon.

[0502] Method 2 (DNA-based): Alternatively, if a cDNA clone is available for a gene encoding a DTP4 polypeptide homolog, the entire cDNA insert (containing 5′ and 3′ non-coding regions) can be PCR amplified. Forward and reverse primers can be designed that contain either the attB1 sequence and vector-specific sequence that precedes the cDNA insert or the attB2 sequence and vector-specific sequence that follows the cDNA insert, respectively. For a cDNA insert cloned into the vector pBulescript SK+, the forward primer VC062 (SEQ ID NO:14) and the reverse primer VC063 (SEQ ID NO:15) can be used.

[0503] Method 3 (genomic DNA): Genomic sequences can be obtained using long range genomic PCR capture. Primers can be designed based on the sequence of the genomic locus and the resulting PCR product can be sequenced. The sequence can be analyzed using the FGENESH (Salamov, A. and Solovyev, V. (2000) Genome Res., 10: 516-522) program, and optionally, can be aligned with homologous sequences from other species to assist in identification of putative introns.

[0504] The above methods can be modified according to procedures known by one skilled in the art. For example, the primers of Method 1 may contain restriction sites instead of attB1 and attB2 sites, for subsequent cloning of the PCR product into a vector containing attB1 and attB2 sites. Additionally, Method 2 can involve amplification from a cDNA clone, a lambda clone, a BAC clone or genomic DNA.

[0505] A PCR product obtained by either method above can be combined with the GATEWAY® donor vector, such as pDONR™/Zeo (INVITROGEN™) or pDONR™ 221 (INVITROGEN™), using a BP Recombination Reaction. This process removes the bacteria lethal ccdB gene, as well as the chloramphenicol resistance gene (CAM) from pDONR™ 221 and directionally clones the PCR product with flanking attB1 and attB2 sites to create an entry clone. Using the INVITROGEN™ GATEWAY® CLONASE™ technology, the sequence encoding the homologous DTP4 polypeptide from the entry clone can then be transferred to a suitable destination vector, such as pBC-Yellow, PHP27840 or PHP23236 (PCT Publication No. WO/2012/058528; herein incorporated by reference), to obtain a plant expression vector for use with Arabidopsis, soybean and corn, respectively.

[0506] Sequences of the attP1 and attP2 sites of donor vectors pDONR™/Zeo or pDONR™ 221 are given in SEQ ID NOs:2 and 3, respectively. The sequences of the attR1 and attR2 sites of destination vectors pBC-Yellow, PHP27840 and PHP23236 are given in SEQ ID NOs:8 and 9, respectively. A BP Reaction is a recombination reaction between an Expression Clone (or an attB-flanked PCR product) and a Donor (e.g., pDONR™) Vector to create an Entry Clone. A LR Reaction is a recombination between an Entry Clone and a Destination Vector to create an Expression Clone. A Donor Vector contains attP1 and attP2 sites. An Entry Clone contains attL1 and attL2 sites (SEQ ID NOs:4 and 5, respectively). A Destination Vector contains attR1 and attR2 site. An Expression Clone contains attB1 and attB2 sites. The attB1 site is composed of parts of the attL1 and attR1 sites. The attB2 site is composed of parts of the attL2 and attR2 sites.

[0507] Alternatively a MultiSite GATEWAY® LR recombination reaction between multiple entry clones and a suitable destination vector can be performed to create an expression vector.

### Example 10

### Preparation of Soybean Expression Vectors and Transformation of Soybean with Validated Arabidopsis Lead Genes

[0508] Soybean plants can be transformed to overexpress a validated Arabidopsis lead gene or the corresponding homologs from various species in order to examine the resulting phenotype.

[0509] The same GATEWAY® entry clone described in Example 5 can be used to directionally clone each gene into the PHP27840 vector (PCT Publication No. WO/2012/058528) such that expression of the gene is under control of the SCP1 promoter (International Publication No. 03/033651).

[0510] Soybean embryos may then be transformed with the expression vector comprising sequences encoding the instant polypeptides. Techniques for soybean transformation and regeneration have been described in International Patent Publication WO 2009/006276, the contents of which are herein incorporated by reference.

[0511] T1 plants can be subjected to a soil-based drought stress. Using image analysis, plant area, volume, growth rate and color analysis can be taken at multiple times before and during drought stress. Overexpression constructs that result in a significant delay in wilting or leaf area reduction, yellow color accumulation and/or increased growth rate during drought stress will be considered evidence that the Arabidopsis gene functions in soybean to enhance drought tolerance.

[0512] Soybean plants transformed with validated genes can then be assayed under more vigorous field-based studies to study yield enhancement and/or stability under well-watered and water-limiting conditions.

### Example 11

### Transformation of Maize with Validated Arabidopsis Lead Genes Using Particle Bombardment

[0513] Maize plants can be transformed to overexpress a validated Arabidopsis lead gene or the corresponding homologs from various species in order to examine the resulting phenotype.

[0514] The same GATEWAY® entry clone described in Example 5 can be used to directionally clone each gene into a maize transformation vector. Expression of the gene in the maize transformation vector can be under control of a constitutive promoter such as the maize ubiquitin promoter (Christensen et al., (1989) Plant Mol. Biol. 12:619-632 and Christensen et al., (1992) Plant Mol. Biol. 18:675-689)

[0515] The recombinant DNA construct described above can then be introduced into corn cells by particle bombardment. Techniques for corn transformation by particle bombardment have been described in International Patent Publication WO 2009/006276, the contents of which are herein incorporated by reference.

[0516] T1 plants can be subjected to a soil-based drought stress. Using image analysis, plant area, volume, growth rate and color analysis can be taken at multiple times before and during drought stress. Overexpression constructs that result in a significant delay in wilting or leaf area reduction, yellow color accumulation and/or increased growth rate during drought stress will be considered evidence that the Arabidopsis gene functions in maize to enhance drought tolerance.

### Example 12

### Electroporation of Agrobacterium tumefaciens LBA4404

[0517] Electroporation competent cells (40 μL), such as Agrobacterium tumefaciens LBA4404 containing PHP10523 (PCT Publication No. WO/2012/058528), are thawed on ice (20-30 min). PHP10523 contains VIR genes for T-DNA transfer, an Agrobacterium low copy number plasmid origin of replication, a tetracycline resistance gene, and a Cos site for in vivo DNA bimolecular recombination. Meanwhile the electroporation cuvette is chilled on ice. The electroporator settings are adjusted to 2.1 kV. A DNA aliquot (0.5 μL parental DNA at a concentration of 0.2 μg-1.0 μg in low salt buffer or twice distilled H₂O) is mixed with the thawed Agrobacterium tumefaciens LBA4404 cells while still on ice. The mixture is transferred to the bottom of electroporation cuvette and kept at rest on ice for 1-2 min. The cells are electroporated (Eppendorf electroporator 2510) by pushing the “pulse” button twice (ideally achieving a 4.0 millisecond pulse). Subsequently, 0.5 mL of room temperature 2×YT medium (or SOC medium) are added to the cuvette and transferred to a 15 mL snap-cap tube (e.g., FALCON™ tube). The cells are incubated at 28-30° C., 200-250 rpm for 3 h.

[0518] Aliquots of 250 μL are spread onto plates containing YM medium and 50 μg/mL spectinomycin and incubated three days at 28-30° C. To increase the number of transformants one of two optional steps can be performed:

[0519] Option 1: Overlay plates with 30 μL of 15 mg/mL rifampicin. LBA4404 has a chromosomal resistance gene for rifampicin. This additional selection eliminates some contaminating colonies observed when using poorer preparations of LBA4404 competent cells.

[0520] Option 2: Perform two replicates of the electroporation to compensate for poorer electrocompetent cells.

[0521] Identification of Transformants:

[0522] Four independent colonies are picked and streaked on plates containing AB minimal medium and 50 μg/mL spectinomycin for isolation of single colonies. The plates are incubated at 28° C. for two to three days. A single colony for each putative co-integrate is picked and inoculated with 4 mL of 10 g/L bactopeptone, 10 g/L yeast extract, 5 g/L sodium chloride and 50 mg/L spectinomycin. The mixture is incubated for 24 h at 28° C. with shaking. Plasmid DNA from 4 mL of culture is isolated using Qiagen® Miniprep and an optional Buffer PB wash. The DNA is eluted in 30 μL. Aliquots of 2 L are used to electroporate 20 L of DH10b+20 L of twice distilled H₂O as per above. Optionally a 15 L aliquot can be used to transform 75-100 μL of INVITROGEN™ Library Efficiency DH5α. The cells are spread on plates containing LB medium and 50 μg/mL spectinomycin and incubated at 37° C. overnight.

[0523] Three to four independent colonies are picked for each putative co-integrate and inoculated 4 mL of 2×YT medium (10 g/L bactopeptone, 10 g/L yeast extract, 5 g/L sodium chloride) with 50 μg/mL spectinomycin. The cells are incubated at 37° C. overnight with shaking. Next, isolate the plasmid DNA from 4 mL of culture using QIAprep® Miniprep with optional Buffer PB wash (elute in 50 μL). Use 8 L for digestion with Sail (using parental DNA and PHP10523 as controls). Three more digestions using restriction enzymes BamHI, EcoRI, and HindIII are performed for 4 plasmids that represent 2 putative co-integrates with correct Sail digestion pattern (using parental DNA and PHP10523 as controls). Electronic gels are recommended for comparison.

### Example 13

### Transformation of Maize Using Agrobacterium

[0524] Maize plants can be transformed to overexpress a validated Arabidopsis lead gene or the corresponding homologs from various species in order to examine the resulting phenotype.

[0525] Agrobacterium-mediated transformation of maize is performed essentially as described by Zhao et al. in Meth. Mol. Biol. 318:315-323 (2006) (see also Zhao et al., Mol. Breed. 8:323-333 (2001) and U.S. Pat. No. 5,981,840 issued Nov. 9, 1999, incorporated herein by reference). The transformation process involves bacterium innoculation, co-cultivation, resting, selection and plant regeneration.

[0526] 1. Immature Embryo Preparation:

[0527] Immature maize embryos are dissected from caryopses and placed in a 2 mL microtube containing 2 mL PHI-A medium.

[0528] 2. Agrobacterium Infection and Co-Cultivation of Immature Embryos:

[0529] 2.1 Infection Step:

[0530] PHI-A medium of (1) is removed with 1 mL micropipettor, and 1 mL of Agrobacterium suspension is added. The tube is gently inverted to mix. The mixture is incubated for 5 min at room temperature.

[0531] 2.2 Co-Culture Step:

[0532] The Agrobacterium suspension is removed from the infection step with a 1 mL micropipettor. Using a sterile spatula the embryos are scraped from the tube and transferred to a plate of PHI-B medium in a 100×15 mm Petri dish. The embryos are oriented with the embryonic axis down on the surface of the medium. Plates with the embryos are cultured at 20° C., in darkness, for three days. L-Cysteine can be used in the co-cultivation phase. With the standard binary vector, the co-cultivation medium supplied with 100-400 mg/L L-cysteine is critical for recovering stable transgenic events.

[0533] 3. Selection of Putative Transgenic Events:

[0534] To each plate of PHI-D medium in a 100×15 mm Petri dish, 10 embryos are transferred, maintaining orientation and the dishes are sealed with parafilm. The plates are incubated in darkness at 28° C. Actively growing putative events, as pale yellow embryonic tissue, are expected to be visible in six to eight weeks. Embryos that produce no events may be brown and necrotic, and little friable tissue growth is evident. Putative transgenic embryonic tissue is subcultured to fresh PHI-D plates at two-three week intervals, depending on growth rate. The events are recorded.

[0535] 4. Regeneration of T0 Plants:

[0536] Embryonic tissue propagated on PHI-D medium is subcultured to PHI-E medium (somatic embryo maturation medium), in 100×25 mm Petri dishes and incubated at 28° C., in darkness, until somatic embryos mature, for about ten to eighteen days. Individual, matured somatic embryos with well-defined scutellum and coleoptile are transferred to PHI-F embryo germination medium and incubated at 28° C. in the light (about 80 μE from cool white or equivalent fluorescent lamps). In seven to ten days, regenerated plants, about 10 cm tall, are potted in horticultural mix and hardened-off using standard horticultural methods.

[0537] Media for Plant Transformation:
[0538] 1. PHI-A: 4 g/L CHU basal salts, 1.0 mL/L 1000× Eriksson's vitamin mix, 0.5 mg/L thiamin HCl, 1.5 mg/L 2,4-D, 0.69 g/L L-proline, 68.5 g/L sucrose, 36 g/L glucose, pH 5.2. Add 100 μM acetosyringone (filter-sterilized).
[0539] 2. PHI-B: PHI-A without glucose, increase 2,4-D to 2 mg/L, reduce sucrose to 30 g/L and supplemented with 0.85 mg/L silver nitrate (filter-sterilized), 3.0 g/L Gelrite®, 100 μM acetosyringone (filter-sterilized), pH 5.8.
[0540] 3. PHI-C: PHI-B without Gelrite® and acetosyringonee, reduce 2,4-D to 1.5 mg/L and supplemented with 8.0 g/L agar, 0.5 g/L 2-[N-morpholino]ethane-sulfonic acid (MES) buffer, 100 mg/L carbenicillin (filter-sterilized).
[0541] 4. PHI-D: PHI-C supplemented with 3 mg/L bialaphos (filter-sterilized).
[0542] 5. PHI-E: 4.3 g/L of Murashige and Skoog (MS) salts, (Gibco, BRL 11117-074), 0.5 mg/L nicotinic acid, 0.1 mg/L thiamine HCl, 0.5 mg/L pyridoxine HCl, 2.0 mg/L glycine, 0.1 g/L myo-inositol, 0.5 mg/L zeatin (Sigma, Cat. No. Z-0164), 1 mg/L indole acetic acid (IAA), 26.4 μg/L abscisic acid (ABA), 60 g/L sucrose, 3 mg/L bialaphos (filter-sterilized), 100 mg/L carbenicillin (filter-sterilized), 8 g/L agar, pH 5.6.
[0543] 6. PHI-F: PHI-E without zeatin, IAA, ABA; reduce sucrose to 40 g/L; replacing agar with 1.5 g/L Gelrite®; pH 5.6.

[0544] Plants can be regenerated from the transgenic callus by first transferring clusters of tissue to N6 medium supplemented with 0.2 mg per liter of 2,4-D. After two weeks the tissue can be transferred to regeneration medium (Fromm et al., Bio/Technology 8:833-839 (1990)).

[0545] Transgenic T0 plants can be regenerated and their phenotype determined. T1 seed can be collected.

[0546] Furthermore, a recombinant DNA construct containing a validated Arabidopsis gene can be introduced into an elite maize inbred line either by direct transformation or introgression from a separately transformed line.

[0547] Transgenic plants, either inbred or hybrid, can undergo more vigorous field-based experiments to study yield enhancement and/or stability under water limiting and water non-limiting conditions.

[0548] Subsequent yield analysis can be done to determine whether plants that contain the validated Arabidopsis lead gene have an improvement in yield performance (under water limiting or non-limiting conditions), when compared to the control (or reference) plants that do not contain the validated Arabidopsis lead gene. Specifically, water limiting conditions can be imposed during the flowering and/or grain fill period for plants that contain the validated Arabidopsis lead gene and the control plants. Plants containing the validated Arabidopsis lead gene would have less yield loss relative to the control plants, for example, at least 25%, at least 20%, at least 15%, at least 10% or at least 5% less yield loss, under water limiting conditions, or would have increased yield, for example, at least 5%, at least 10%, at least 15%, at least 20% or at least 25% increased yield, relative to the control plants under water non-limiting conditions.

### Example 14A

### Preparation of Arabidopsis Lead Gene (At5g62180) Expression Vector for Transformation of Maize

[0549] Using INVITROGEN™ GATEWAY® technology, an LR Recombination Reaction was performed to create the precursor plasmid pEV-DTP4. The vector pEV-DTP4 contains the following expression cassette:

[0550] Ubiquitin promoter::At5g62180(SEQ ID NO:17)::PinII terminator; cassette overexpressing the gene of interest, Arabidopsis DTP4 polypeptide.

[0551] The At5g62180 sequence with alternative codons, SEQ ID NO:19, was also cloned to create the precursor plasmid pEV-DTP4ac, which contains the following expression cassette: Ubiquitin promoter::At5g62180 (SEQ ID NO:19)::SB-GKAF terminator; cassette overexpressing the gene of interest, Arabidopsis DTP4 polypeptide.

[0552] The SB-GKAF terminator is described in U.S. application Ser. No. 14/236,499, herein incorporated by reference.

### Example 14B

### Transformation of Maize with the Arabidopsis Lead Gene (At5q62180) Using Agrobacterium

[0553] The DTP4 polypeptide expression cassette present in vector pEV-DTP4, and the DTP4 polypeptide expression cassette present in vector pEV-DTP4ac can be introduced into a maize inbred line, or a transformable maize line derived from an elite maize inbred line, using Agrobacterium-mediated transformation as described in Examples 12 and 13.

[0554] Vector pEV-DTP4 can be electroporated into the LBA4404 Agrobacterium strain containing vector PHP10523 (PCT Publication No. WO/2012/058528) to create the co-integrate vector pCV-DTP4. The co-integrate vector is formed by recombination of the 2 plasmids, pEV-DTP4 and PHP10523, through the COS recombination sites contained on each vector. The co-integrate vector pCV-DTP4 contains the same expression cassette as above (Example 14A) in addition to other genes (TET, TET, TRFA, ORI terminator, CTL, ORI V, VIR C1, VIR C2, VIR G, VIR B) needed for the Agrobacterium strain and the Agrobacterium-mediated transformation.

[0555] Similarly, the vector pEV-DTP4ac and PHP10523 were recombined to give the co-integrate vector pCV-DTP4ac. The co-integrate vector pCV-DTP4ac contains the same expression cassette as pEV-DTP4ac (Example 14A) in addition to other genes (TET, TET, TRFA, ORI terminator, CTL, ORI V, VIR C1, VIR C2, VIR G, VIR B) needed for the Agrobacterium strain and the Agrobacterium-mediated transformation

### Example 15

### Preparation of the Destination Vector PHP23236 for Transformation into Gaspe Flint Derived Maize Lines

[0556] Destination vector PHP23236 was obtained by transformation of Agrobacterium strain LBA4404 containing plasmid PHP10523 with plasmid PHP23235 and isolation of the resulting co-integration product. Plasmids PHP23236, PHP10523 and PHP23235 are described in PCT Publication No. WO/2012/058528, herein incorporated by reference. Destination vector PHP23236, can be used in a recombination reaction with an entry clone as described in Example 16 to create a maize expression vector for transformation of Gaspe Flint-derived maize lines.

### Example 16

### Preparation of Plasmids for Transformation into Gaspe Flint Derived Maize Lines

[0557] Using the INVITROGEN™ GATEWAY® LR Recombination technology, the protein-coding region of the At5g62180 candidate gene, was directionally cloned into the destination vector PHP23236 (PCT Publication No. WO/2012/058528) to create an expression vector, pGF-DTP4. This expression vector contains the protein-coding region of interest, encoding the DTP4 polypeptide, under control of the UBI promoter and is a T-DNA binary vector for Agrobacterium-mediated transformation into corn as described, but not limited to, the examples described herein.

### Example 17

### Transformation of Gaspe Flint Derived Maize Lines with a Validated Arabidopsis Lead Gene

[0558] Maize plants can be transformed to overexpress the Arabidopsis lead gene or the corresponding homologs from other species in order to examine the resulting phenotype. Gaspe Flint derived maize lines can be transformed and analyzed as previously described in PCT Publication No. WO/2012/058528, the contents of which are herein incorporated by reference.

### Example 18A

### Evaluation of Gaspe Flint Derived Maize Lines for Drought Tolerance

[0559] Transgenic Gaspe Flint derived maize lines containing the candidate gene can be screened for tolerance to drought stress in the following manner.

[0560] Transgenic maize plants are subjected to well-watered conditions (control) and to drought-stressed conditions. Transgenic maize plants are screened at the T1 stage or later.

[0561] For plant growth, the soil mixture consists of ⅓ TURFACE®, ⅓ SB300 and ⅓ sand. All pots are filled with the same amount of soil±10 grams. Pots are brought up to 100% field capacity (“FC”) by hand watering. All plants are maintained at 60% FC using a 20-10-20 (N-P-K) 125 ppm N nutrient solution. Throughout the experiment pH is monitored at least three times weekly for each table. Starting at 13 days after planting (DAP), the experiment can be divided into two treatment groups, well watered and reduce watered. All plants comprising the reduced watered treatment are maintained at 40% FC while plants in the well watered treatment are maintained at 80% FC. Reduced watered plants are grown for 10 days under chronic drought stress conditions (40% FC). All plants are imaged daily throughout chronic stress period. Plants are sampled for metabolic profiling analyses at the end of chronic drought period, 22 DAP. At the conclusion of the chronic stress period all plants are imaged and measured for chlorophyll fluorescence. Reduced watered plants are subjected to a severe drought stress period followed by a recovery period, 23-31 DAP and 32-34 DAP respectively. During the severe drought stress, water and nutrients are withheld until the plants reached 8% FC. At the conclusion of severe stress and recovery periods all plants are again imaged and measured for chlorophyll fluorescence. The probability of a greater Student's t Test is calculated for each transgenic mean compared to the appropriate null mean (either segregant null or construct null). A minimum (P<t) of 0.1 is used as a cut off for a statistically significant result.

### Example 18B

### Evaluation of Maize Lines for Drought Tolerance

[0562] Lines with Enhanced Drought Tolerance can also be screened using the following method (see also FIG. 3 for treatment schedule):

[0563] Transgenic maize seedlings are screened for drought tolerance by measuring chlorophyll fluorescence performance, biomass accumulation, and drought survival. Transgenic plants are compared against the null plant (i.e., not containing the transgene). Experimental design is a Randomized Complete Block and Replication consist of 13 positive plants from each event and a construct null (2 negatives each event).

[0564] Plant are grown at well watered (WW) conditions=60% Field Capacity (% FC) to a three leaf stage. At the three leaf stage and under WW conditions the first fluorescence measurement is taken on the uppermost fully extended leaf at the inflection point, in the leaf margin and avoiding the mid rib.

[0565] This is followed by imposing a moderate drought stress (FIG. 3, day 13, MOD DRT) by maintaining 20% FC for duration of 9 to 10 days. During this stress treatment leaves may appear gray and rolling may occur. At the end of MOD DRT period, plants are recovered (MOD rec) by increasing to 25% FC. During this time, leaves will begin to unroll. This is a time sensitive step that may take up to 1 hour to occur and can be dependent upon the construct and events being tested. When plants appear to have recovered completed (leaves unrolled), the second fluorescence measurement is taken.

[0566] This is followed by imposing a severe drought stress (SEV DRT) by withholding all water until the plants collapse. Duration of severe drought stress is 8-10 days and/or when plants have collapse. Thereafter, a recovery (REC) is imposed by watering all plants to 100% FC. Maintain 100% FC 72 hours. Survival score (yes/no) is recorded after 24, 48 and 72 hour recovery.

The entire shoot (Fresh) is sampled and weights are recorded (Fresh shoot weights). Fresh shoot material is then dried for 120 hrs at 70 degrees at which time a Dry Shoot weight is recorded.

[0567] Measured variables are defined as follows:

[0568] The variable “Fv′/Fm′ no stress” is a measure of the optimum quantum yield (Fv′/Fm′) under optimal water conditions on the uppermost fully extended leaf (most often the third leaf) at the inflection point, in the leaf margin and avoiding the mid rib. Fv′/Fm′ provides an estimate of the maximum efficiency of PSII photochemistry at a given PPFD, which is the PSII operating efficiency if all the PSII centers were open (Q_{A} oxidized).

[0569] The variable “Fv′/Fm′ stress” is a measure of the optimum quantum yield (Fv′/Fm′) under water stressed conditions (25% field capacity). The measure is preceded by a moderate drought period where field capacity drops from 60% to 20%. At which time the field capacity is brought to 25% and the measure collected.

[0570] The variable “phiPSII_no stress” is a measure of Photosystem II (PSII) efficiency under optimal water conditions on the uppermost fully extended leaf (most often the third leaf) at the inflection point, in the leaf margin and avoiding the mid rib. The phiPSII value provides an estimate of the PSII operating efficiency, which estimates the efficiency at which light absorbed by PSII is used for Q_{A} reduction.

[0571] The variable “phiPSII_stress” is a measure of Photosystem II (PSII) efficiency under water stressed conditions (25% field capacity). The measure is preceded by a moderate drought period where field capacity drops from 60% to 20%. At which time the field capacity is brought to 25% and the measure collected.

### Example 19A

### Yield Analysis of Maize Lines with the Arabidopsis Lead Gene

[0572] A recombinant DNA construct containing a validated Arabidopsis gene can be introduced into an elite maize inbred line either by direct transformation or introgression from a separately transformed line.

[0573] Transgenic plants either inbred or hybrid, can undergo more vigorous field-based experiments to study yield enhancement and/or stability under well-watered and water-limiting conditions.

[0574] Subsequent yield analysis can be done to determine whether plants that contain the validated Arabidopsis lead gene have an improvement in yield performance under water-limiting conditions, when compared to the control plants that do not contain the validated Arabidopsis lead gene. Specifically, drought conditions can be imposed during the flowering and/or grain fill period for plants that contain the validated Arabidopsis lead gene and the control plants. Reduction in yield can be measured for both. Plants containing the validated Arabidopsis lead gene have less yield loss relative to the control plants, for example, at least 25%, at least 20%, at least 15%, at least 10% or at least 5% less yield loss.

[0575] The above method may be used to select transgenic plants with increased yield, under water-limiting conditions and/or well-watered conditions, when compared to a control plant not comprising said recombinant DNA construct. Plants containing the validated Arabidopsis lead gene may have increased yield, under water-limiting conditions and/or well-watered conditions, relative to the control plants, for example, at least 5%, at least 10%, at least 15%, at least 20% or at least 25% increased yield.

### Example 19B

### Yield Analysis of Maize Lines Transformed with pCV-DTP4 Encoding the Arabidopsis Lead Gene At5g62180

[0576] Nine transgenic events were field tested at 3 locations, Locations “A”, “E”, and “B”. At the “B” location, drought conditions were imposed during flowering (“B1”; flowering stress) and during the grain fill period (“B2”; grain fill stress). The “A” location was well-watered, and the “E” location experienced mild drought during the grain-filling period. Yield data (bushel/acre; bu/ac) of the 9 transgenic events is shown in FIG. 5 together with the wt and bulk null control (BN). Statistical significance is reported at P<0.1 for a two-tailed test.

[0577] The significant values (with p-value less than or equal to 0.1 with a 2-tailed test) are shown in bold when the value is greater than the null comparator and in bold and italics when that value is less than the null.

[0578] In the most severe “B2” location it was neutral. In an intermediate “B1” location three events were positive but the experiment was unreliable because of the unexpected divergence between null and wild type performance.

### Example 19C

### Yield Analysis of Maize Lines Transformed with pCV-DTP4ac Encoding the Arabidopsis Lead Gene At5q62180

[0579] First Year Testing:

[0580] The AT-DTP4 polypeptide (SEQ ID NO:18) encoded by the nucleotide sequence (SEQ ID NO:19) present in the vector pCV-DTP4ac was introduced into a transformable maize line derived from an elite maize inbred line as described in Examples 14A and 14B.

[0581] Eight transgenic events were field tested at 5 locations A, E, C, D, and B. At the location B, mild drought conditions were imposed during flowering (this treatment was divided into 2 areas B1-a and B1-b) and severe drought conditions were imposed during the grain fill period (“grain fill stress; B2). The “A” location was well-watered, and the “E” location experienced mild drought during the grain-filling period. Both “C” and “D” locations experienced severe stress (FIG. 10).

[0582] Yield data were collected in all locations, with 3-6 replicates per location.

[0583] Yield data (bushel/acre; bu/ac) for the 8 transgenic events is shown in FIGS. 10A and 10B together with the bulk null control (BN). Yield analysis was by ASREML (VSN International Ltd), and the values are BLUPs (Best Linear Unbiased Prediction) (Cullis, B. R et al (1998) Biometrics 54: 1-18, Gilmour, A. R. et al (2009). ASReml User Guide 3.0, Gilmour, A. R., et al (1995) Biometrics 51: 1440-50).

[0584] As shown in FIG. 10A, consistent effect of the transgene on yield was seen in at all the locations that resulted in a significant positive effect in 3-8 events., with the positive event magnitude ranging from 4 to 16 bu/ac.

[0585] FIG. 10B shows the yield analysis by grouping locations into “high stress”, “low stress” and “no stress (TPE)” category. As can be seen from FIG. 15B, positive effect of the transgene on yield was seen for all 8 transgenic events in high stress and low stress locations, and in 2 events in the “no stress category”.

[0586] Effect of the transgene on other agronomic characteristics were also evaluated; such as plant and ear height (EARHT, PLTHT; at location “A” (no-stress) and location “D” (high-stress) locations), thermal time to shed (TTSHED: locations “D” and B2-b (location B at grain filling stress); both high-stress locations), percent root lodging or stalk lodging (LRTLPC, STLPCT; at the location “E” (low stress location). As shown in FIG. 11A and FIG. 11B, no effect of the transgene on these characteristics was observed.

[0587] Second Year Testing:

[0588] The eight transgenic events field tested for the first year, were field tested for a second year multiple locations with different levels of drought stress: no stress (8 locations; 1-8 in FIG. 14A); medium stress (5 locations; 9-13 in FIG. 14A); and severe stress (5 locations; 14-18 in FIG. 14A).

[0589] The eight transgenic events were also tested in three low nitrogen locations (locations 19-21 in FIG. 14A)

[0590] Yield data were collected in all locations, with 3-6 replicates per location.

[0591] Yield data (bushel/acre; bu/ac) for the 8 transgenic events is shown in FIG. 14A-14C for the drought stress, and in FIG. 15 the yield data in response to low nitrogen is shown; all the data are shown with the bulk null control (BN). Yield analysis was by ASREML (VSN International Ltd), and the values are BLUPs (Best Linear Unbiased Prediction) (Cullis, B. R et al (1998) Biometrics 54: 1-18, Gilmour, A. R. et al (2009). ASReml User Guide 3.0, Gilmour, A. R., et al (1995) Biometrics 51: 1440-50). FIG. 14D shows the multi-location anlaysis for the “no stress”, “medium stress” and “severe stress” locations, along with the multi-location analysis for all the drought stress locations.

[0592] As shown in FIG. 14A-FIG. 14D, effect of the transgene on yield was seen in at least one location with no stress, at least 2 locations in medium and severe stress; the multi-location analysis in FIG. 14D shows consistent positive effect of the transgene on yield., with the positive event magnitude ranging from 15 to 20 bu/ac, under medium stress.

[0593] FIG. 14D shows the yield analysis by grouping locations into “high stress”, “low stress” and “no stress” category. As can be seen from FIG. 14B, positive effect of the transgene on yield was seen for all 8 transgenic events in medium stress and severe stress locations, and in 2 events in the “no stress category”.

[0594] As shown in FIG. 15, no positive effect of the transgene on yield was observed under low nitrogen conditions.

### Example 19D

### Yield Analysis of Maize Lines Transformed with pCV-AT-CXE8ac Encoding the Arabidopsis DTP4 Homolog AT-CXE8

[0595] The AT-CXE8 polypeptide (SEQ ID NO:64) encoded by the nucleotide sequence (SEQ ID NO:63), with alternative codons, was cloned as described in Example 14A and Example 14B; using the Invitrogen Gateway technology.

[0596] The At2g45600 sequence with alternative codons, SEQ ID NO:63 was also cloned to create the precursor plasmid pEV-CXE8ac, which contains the following expression cassette: Zm Ubiquitin promoter::At2g45600 (SEQ ID NO:63)::Sb-Ubi terminator; cassette overexpressing the gene of interest, the AT-DTP4 homolog, Arabidopsis CXE8 polypeptide.

[0597] The AT-CXE8 polypeptide (SEQ ID NO:64) encoded by the nucleotide sequence (SEQ ID NO:63) present in the vector pCV-AT-CXE8ac was introduced into a transformable maize line derived from an elite maize inbred line as described in Examples 14A and 14B.

[0598] Seven transgenic events were field tested at 7 locations.

[0599] The seven transgenic events were field tested at multiple locations with different levels of drought stress: no stress (1 location; location 28 in FIG. 16A); medium stress (1 location; location 22 in FIG. 16A); and severe stress (4 locations; locations 24-27 in FIG. 16A).

[0600] Yield data were collected in all locations, with 3-6 replicates per location.

[0601] Yield data (bushel/acre; bu/ac) for the seven transgenic events is shown in FIGS. 16A and 16B together with the bulk null control (BN). Yield analysis was by ASREML (VSN International Ltd), and the values are BLUPs (Best Linear Unbiased Prediction) (Cullis, B. R et al (1998) Biometrics 54: 1-18, Gilmour, A. R. et al (2009). ASReml User Guide 3.0, Gilmour, A. R., et al (1995) Biometrics 51: 1440-50).

[0602] As shown in FIG. 16A, consistent effect of the transgene on yield was seen at no stress and severe stress locations, that resulted in a significant positive effect in 3-8 events, with the positive event magnitude ranging from 5 to 10 bu/ac.

[0603] FIG. 16B shows the yield analysis across locations, grouped by drought stress levels. As can be seen from FIG. 16B, positive effect of the transgene on yield was seen for 6 transgenic events in across location analysis, after taking all stress level locations together.

### Example 20A

### Preparation of Maize DTP4 Polypeptide Lead Gene Expression Vector for Transformation of Maize

[0604] The protein-coding region of the maize DTP4 homologs disclosed in the application can be introduced into the INVITROGEN™ vector pENTR/D-TOPO® to create entry clones.

[0605] Using INVITROGEN™ GATEWAY® technology, LR Recombination Reaction can be performed with the entry clones and a destination vector to create precursor plasmids. These vectors contain the following expression cassette:

[0606] Ubiquitin promoter::Zm-DTP4-Polypeptide::Pin II terminator; cassette overexpressing the gene of interest.

### Example 20B

### Transformation of Maize with Maize DTP4 Polypeptide Lead Gene Using Agrobacterium

[0607] The maize DTP4 polypeptide expression cassette present in the vectors from the above example can be introduced into a maize inbred line, or a transformable maize line derived from an elite maize inbred line, using Agrobacterium-mediated transformation as described in Examples 12 and 13.

[0608] Any or of these vectors can be electroporated into the LBA4404 Agrobacterium strain containing vector PHP10523 (PCT Publication No. WO/2012/058528) to create a co-integrate vector. The co-integrate vector is formed by recombination of the 2 plasmids, the precursor plasmid and PHP10523, through the COS recombination sites contained on each vector. The co-integrate vector contains the same 3 expression cassettes as above (Example 20A) in addition to other genes (TET, TET, TRFA, ORI terminator, CTL, ORI V, VIR C1, VIR C2, VIR G, VIR B) needed for the Agrobacterium strain and the Agrobacterium-mediated transformation.

### Example 21

### Preparation of Maize Expression Plasmids for Transformation into Gaspe Flint Derived Maize Lines

[0609] Using the INVITROGEN™ GATEWAY® Recombination technology described in Example 9, the clones encoding maize DTP4 polypeptide homologs disclosed herein can be directionally cloned into the destination vector PHP23236 (PCT Publication No. WO/2012/058528) to create expression vectors. Each expression vector contains the cDNA of interest under control of the UBI promoter and is a T-DNA binary vector for Agrobacterium-mediated transformation into corn as described, but not limited to, the examples described herein.

### Example 22

### Transformation and Evaluation of Soybean with Soybean Homologs of Validated Lead Genes

[0610] Based on homology searches, one or several candidate soybean homologs of validated Arabidopsis lead genes can be identified and also be assessed for their ability to enhance drought tolerance in soybean. Vector construction, plant transformation and phenotypic analysis will be similar to that in previously described Examples.

### Example 23

### Transformation of Arabidopsis with Maize and Soybean Homologs of Validated Lead Genes

[0611] Soybean and maize homologs to validated Arabidopsis lead genes can be transformed into Arabidopsis under control of the 35S promoter and assessed for their ability to enhance drought tolerance in Arabidopsis. Vector construction, plant transformation and phenotypic analysis will be similar to that in previously described Examples.

### Example 24

### Transformation of Arabidopsis with DTP4 Polypeptides from Other Species

[0612] Any of the DTP4 polypeptides disclosed herein, including the ones given in Table 1 or Table 2, can be transformed into Arabidopsis under control of the 35S promoter and assessed for their ability to enhance drought tolerance, or in any of the other assays described herein, in Arabidopsis. Vector construction, plant transformation and phenotypic analysis will be similar to that in previously described Examples.

### Example 25A

### Osmotic Stress Assay

[0613] To assay the osmotic stress tolerance of a transgenic line, a combination of osmolytes in the media, such as water soluble inorganic salts, sugar alcohols and high molecular weight non-penetrating osmolytes can be used to select for osmotically-tolerant plant lines.

[0614] The osmotic stress agents used in this quad stress assay are:
[0615] 1) NaCl (sodium chloride)
[0616] 2) Sorbitol
[0617] 3) Mannitol
[0618] 4) Polyethylene Glycol (PEG)
   By providing these agents in the media, we aim to mimic multiple stress conditions in the in vitro environment thereby giving the plant the opportunity to respond to four stress agents.

### Methods and Materials:

[0619] As there are four stress agents being used together, a quarter of each together in a solution will denote 100% stress or an osmotic pressure of 1.23 MPa. Therefore the following concentrations of each component are used in 100% quad media.

| Stress agents | Concentrations |
|---|---|
| NaCl— | 62.5 mM |
| Sorbitol- | 125 mM |
| Mannitol- | 125 mM |
| PEG- | 10% |

### Assay Conditions:

[0620] Seeds are surface sterilized and stratified for 48 hrs. About 100 seeds are inoculated in one plate and cultured in a growth chamber programmed for 16 h of light at 22′C temperature and 50% relative humidity. Germination is scored as the emergence of radicle.

### Assay Plan:

[0621] A 6-day assay and an extended 10-day assay are done to test the seeds transgenic Arabidopsis line for osmotic stress tolerance.

Day 0—Surface sterilized seeds of different drought leads and stratify
Day 2—Inoculated onto quad media
Day 4—Counted for germination (48 hrs)
Day 5—Counted for germination (72 hrs) I Take pictures or Scan plates from 48 hrs to 96 hrs.
Day 6—Counted for germination (96 hrs)
For the extended 10-day assay, germination is scored from 48 hrs to 96 hrs. On day 7, 8, 9 and 10, the emerged seedlings were checked for greenness and four leaf stage.

### Preparation of Media:

[0622] Germination medium (GM or 0% quad media) for 1 liter:

| | | |
|---|---|---|
| MS salt | 4.3 | g |
| Sucrose | 10 | g |
| 1000x Vitamin mix | 1 | ml |
| MES (pH 5.7 with KOH) | 10 | ml |
| Phytagel (0.3%) | 3 | g |

To this the quad agents (the four osmolytes) are added by individually weighing the specific amounts in grams for their respective concentrations. Quad media preparation chart for all concentrations of osmolytes is given in Table 6.

TABLE 6
Quad Media Preparation Chart

| | 10% | 20% | 30% | 40% | 50% | 60% | 70% | 80% | 90% | 100% |
|---|---|---|---|---|---|---|---|---|---|---|
| NaCl | 0.36 | 0.731 | 1.09 | 1.46 | 1.82 | 2.19 | 2.55 | 2.9 | 3.29 | 3.656 |
| Mannitol | 2.27 | 4.55 | 8.83 | 9.1 | 11.38 | 13.66 | 15.93 | 18.2 | 20.49 | 22.77 |
| Sorbitol | 2.27 | 4.55 | 6.83 | 9.1 | 11.38 | 13.66 | 15.93 | 18.2 | 20.49 | 22.77 |
| PEG | 10 | 20 | 30 | 40 | 50 | 60 | 70 | 80 | 90 | 100 |

### Sterilization of Seeds:

[0623] Approximately 100 μl of Arabidopsis Columbia wild type seeds (col wt) and the seeds of the transgenic line to be tested are taken in 1.75 ml microfuge tubes and sterilized in ethanol for 1 min 30 sec followed by one wash with sterile water. Then they are subjected to bleach treatment (4% bleach with Tween 20) for 2 min 30 sec. This is followed by 4 to 5 washes in sterile water. Seeds are stratified at 4° C. for 48 hrs before inoculation.

### Inoculation of Seeds:

[0624] Stratified seeds are plated onto a single plate of each quad stress concentration as given in Table 6. Plates are cultured in the chambers set at 16 h of light at 22° C. temperature and 50% relative humidity. Germination is scored as the emergence of radicle over a period of 48 to 96 hrs. Seeds are counted manually using a magnifying lens. Plates are scanned at 800 dpi using Epson scanner 10,000 XL and photographed. In case of the extended assay, leaf greenness (manual) and true leaf emergence i.e, 4Leaf stage (manual scoring) are also scored over a period of 10 days to account for the growth rate and health of the germinated seedlings.

[0625] The data is analyzed as percentage germination to the total number of seeds that are inoculated. Analyzed data is represented in the form of bar graphs and sigmoid curves by plotting quad concentrations against percent germination.

### Example 25B

### Seedling Emergence Under Osmotic Stress of Transgenic Arabidopsis Seeds with AT-DTP4 Proteins

[0626] T1 seeds from transgenic Arabidopsis line with AT-DTP4 protein, containing the 35S promoter::At5g62180 expression construct pBC-Yellow-At5g62180, generated as described above, were tested for seedling emergence under osmotic stress as described in Example 25A.

[0627] Arabidopsis Columbia seeds were used as wild-type control and at 60% there was a dip in germination and thereafter a decline and zero germination at 100%, as shown in Table 7.

[0628] Table 7 presents the percentage germination data at 48 hours for seedling emergence under osmotic stress.

TABLE 7
Percentage Germination Data in Arabidopsis

| Quad % in the | % Germination | % Germination for |
|---|---|---|
| Media | for WT | At5g62180 |
| 0 | 96 | 90 |
| 10 | 80 | 87 |
| 20 | 76 | 90 |
| 30 | 69 | 92 |
| 40 | 52 | 90 |
| 50 | 29 | 82 |
| 60 | 20 | 66 |
| 70 | 10 | 54 |
| 80 | 2 | 9 |
| 90 | 6 | 65 |
| 100 | 0 | 2 |

### Seedling Emergence Under Osmotic Stress—10 Day Assay:

[0629] The results in Table 7 demonstrate that the transgenic Arabidopsis line (Line ID 64) containing the 35S promoter::At5g62180 expression construct, pBC-Yellow-At5g62180, which was previously selected as having a drought tolerance and ABA-hypersensitivity phenotype, also demonstrates increased seedling emergence under osmotic stress.

[0630] The osmotic stress assay for Line ID 64 was repeated, and scored for percentage greenness and percentage leaf emergence in an extended 10 day assay as well. The line was scored at 0% (GM or growth media), 10%, 20%, 30%, 40%, 50%, 60%, 70%, 80%, 90% and 100% quad, for germination at 48 hours, and for percentage greenness and percentage leaf emergence in an extended 10 day assay. The results are shown in FIG. 6A and FIG. 6B.

[0631] Percentage greenness and percentage leaf emergence were assayed. Percentage greenness was scored as the percentage of seedlings with green leaves (cotyledonary or true leaves) compared to yellow, brown or purple leaves. Greenness was scored manually and if there was any yellow or brown streaks on any of the 4 leaves, it was not considered green. Greenness was counted for seedlings with total green leaves only.

[0632] The leaf emergence was scored as the appearance of fully expanded leaves 1 and 2, after the two cotyledonary leaves had fully expanded. Therefore, the percentage leaf emergence is the number of seedlings with 2 true leaves or 4 leaves in total (2 cotyledonary and 2 true leaves).

[0633] The percentage germination experiment at 48 hours was repeated once more with bulked seeds, in triplicates, and the results are shown in FIG. 7. Seeds were plated on MSO plate containing MS media+methionine sulphoximine and selected plants transplanted to the soil, seeds harvested and assayed.

### Example 26A

### ABA/Root Growth Assay

[0634] Plants being sessile have evolved a higher adaptability to overcome adverse environmental challenges. The phytohormone abscisic acid (ABA) is a key endogenous messenger in plants' responses to such stresses and therefore understanding ABA signaling is essential for improving plant performance especially under drought stress. Drought is a very complicated phenomenon involving several key regulators and in order to capture wide spectrum of such players a multi-assay approach is imperative. A root growth assay has been developed keeping this objective in mind.

[0635] In the ABA/Root assay, the sensitivity of root growth on media containing ABA post germination on MS media is used as the assay criterion. MS media comprises of MS basal salts, MS vitamins, sucrose and phytagel as a gelling agent. ABA/Root assay will enable us to potentially capture both hypersensitive and hyposensitive outliers/leads making it a powerful tool for screening of new genes and as a cross validation assay.

[0636] The ABA/Root assay is a two phase assay. Phase I includes growing seeds on plain germination/MS media vertically under 230 μMol light intensity. After 5 days of germination, seedlings are picked and transferred to media comprising ABA. The position of the root tip at the time of transfer is marked. The seedlings are allowed to grow vertically for 7 days on media containing ABA with daily rotation of plates such that each plate receives uniform light. On the seventh day, the plates are imaged and root phenotypes are analyzed. The overall schematic of the assay is presented in FIG. 8.

### Example 26B

### ABA/Root Growth Assay with Transgenic Arabidopsis Seeds with AT-DTP4 Polypeptide

[0637] In this assay, an ABA hypersensitive outlier would be expected to have seedlings arrested at the point of transfer whereas in an ABA hyposensitive outlier the roots would continue to grow because of their inability to sense ABA in the media. For lines that are insensitive, would be expected to behave similar to WT, which would be the negative control.

### Assay Conditions:

[0638] WT seeds and transgenic seeds containing the pBC-yellow-At5g62180 construct described in Example 5A were used for this assay. Seeds were surface sterilized first with 100% ethanol followed with bleach+Tween 20 solution followed by 4 washes of sterile water and stratified for 48 hrs. Two rows of around 30 stratified seeds each were sown on germination media and the plates were kept vertically in the growth chamber for 5 days. The growth chamber settings were 16 h of 230 μMol light at 22° C. temperature and 50% relative humidity. After 5 days, the seedlings were picked one by one and transferred to media containing different concentrations of ABA, 0, 2.5, 5, 10, 15, 17.5, 20, 25 and 30 μM ABA. The seedlings were grown vertically for 7 days. After 7 days, root phenotypes were analyzed and recorded. The representative results for the concentrations in the range 15-25 μM are shown in FIG. 9.

### Example 27

### ABA Sensitivity Assay

### Percentage Germination Assay with DTP4 Polypeptides in Arabidopsis

[0639] DTP4 polypeptides homologous to AT-DTP4 (SEQ ID NO:18) were tested for their ability to confer ABA-hypersensitivity by a percentage germination assay as described in Example 7.

[0640] The cDNA protein-coding region for each of these homologs was synthesized and cloned into the transformation vector. The homologs were tested for ABA hypersensitivity on 2 ABA concentrations, 1 μM and 2 μM.

[0641] Transgenic T2 seeds were selected, and used for the germination assay as described in Example 7. Two Sesbania bispinosa homologs sesgr1n.pk107.c11 and sesgr1n.pk079.h12 and (SEQ ID NOS:44 and 46, respectively), showed ABA hypersensitivity when they were directly expressed by the 35S promoter.

[0642] At 1 μM ABA, wild-type col-0 plants had >90% of germination rate at Day 5. The transgenic line with AtDTP4 construct showed <90% germination on Day 5, as shown in FIG. 12A. The line with a construct expressing the DTP4 homologs sesgr1n.pk079.h12 (SEQ ID NO:47) showed about 70% germination, and that expressing the DTP4 homolog sesgr1n.pk107.c11 (SEQ ID NO:45) showed about 80% germination on day 3.

[0643] At 2 μM ABA, wild-type col-0 plants had >90% of germination rate at Day 5. The transgenic line with AtDTP4 construct showed <70% germination on Day 5, as shown in FIG. 12B. The line with a construct expressing the DTP4 homolog sesgr1n.pk079.h12 (SEQ ID NO:47) showed <50% germination, and that expressing the DTP4 homolog sesgr1n.pk107.c11 (SEQ ID NO:45) showed <70% germination on day 5.

[0644] FIG. 12C shows the percentage germination assay for transgenic Arabidopsis plants expressing some of the other DTP4 homologs that were tested, given in Table 9 and Table 10, respectively.

### Example 28

### ABA Sensitivity Assay

### Green Cotyledon Assay with DTP4 Polypeptides in Arabidopsis

[0645] The DTP4 polypeptides given in Table 8 and Table 9 were tested for their ability to confer ABA hypersensitivity by a percentage green cotyledon assay as described below.

[0646] The cDNA protein-coding region for each of these homologs was synthesized and cloned into the transformation vector. The homologs were tested for ABA hypersensitivity on 2 μM ABA containing medium.

### Assay Conditions:

[0647] Seeds were surface sterilized and stratified for 96 hrs. About 100 seeds were inoculated in one plate and stratified for 96 hrs, then cultured in a growth chamber programmed for 16 h of light at 22° C. temperature and 50% relative humidity. Seedlings with green cotyledons were scored.

### Observations and Results:

[0648] Seedlings with green and expanded cotyledons ware scored in ½ MS media and 2 μM ABA on Day 5-7. Seeds were counted manually using a magnifying lens. The data was analyzed as percentage seedlings with green cotyledons to the total number of seeds that were inoculated. Wild-type col-0 plants normally have ˜60-70% of seedlings with green cotyledons. The line with pBC-yellow-At5g62180 (AtDTP4 expression construct described and some homologs had scores<45% in this assay.

[0649] FIG. 13 and FIG. 12C show the green cotyledon assay and percentage germination assay results respectively (Example 27) for transgenic Arabidopsis plants expressing some of the other DTP4 polypeptides that were tested, given in Table 8 and Table 9, respectively.

TABLE 8
ABA Sensitivity Assay with DTP4 Polypeptides

| | | | Percentage | Cotyledon |
|---|---|---|---|---|
| | SEQ | | germination | greening |
| Clone ID | ID NO | Type | assay | assay |
| ATDTP4 | 18 | Type II | Positive | Positive |
| sesgr1n.pk117.j17 | 39 | Type II | Neutral | Neutral |
| sesgr1n.pk062.h8 | 43 | Type II | Neutral | Neutral |
| sesgr1n.pk107.c11 | 45 | Type II | Positive | Positive |
| sesgr1n.pk079.h12 | 47 | Type II | Positive | Positive |
| arttr1n.pk125.i16 | 49 | Type II | neutral | neutral |
| arttr1n.pk029.e11 | 51 | Type II | neutral | neutral |
| arttr1n.pk120.m9 | 55 | Type II | neutral | neutral |
| hengr1n.pk028.m4 | 59 | Type II | neutral | neutral |
| icegr1n.pk156.e13 | 61 | Type II | neutral | neutral |
| pepgr1n.pk190.l24 | 95 | Type II | neutral | neutral |
| pepgr1n.pk082.c4 | 97 | Type II | neutral | neutral |
| hengr1n.pk014.d12 | 101 | Type II | neutral | neutral |
| ecalgr1n.pk137.m22 | 103 | Type II | neutral | neutral |
| ahgr1c.pk108.k16 | 107 | Type II | neutral | neutral |
| arttr1n.pk193.a17 | 111 | Type II | neutral | neutral |
| arttr1n.pk090.l10 | 113 | Type II | neutral | neutral |
| At-cxe5 | 627 | Type III | neutral | Positive |
| At-cxe8 | 64 | Type II | neutral | Positive |
| At-cxe9 | 65 | Type II | neutral | Negative |
| At-cxe17 | 628 | Type VI | neutral | negative |
| At-cxe18 | 66 | Type IV | neutral | negative |

TABLE 9
ABA Sensitivity Assay with DTP4 Polypeptides

| | | ID in | | | |
|---|---|---|---|---|---|
| | | graph | | | |
| | | in | | | |
| | | FIG. | | | |
| | | 12C | | | |
| | SEQ | and | | Percentage | Cotyledon |
| | ID | FIG. | | germination | greening |
| Clone ID | NO | 13 | Type | assay | assay |
| Thhalv10005595m | 117 | GS3 | Type II | Neutral | Positive |
| Bn-Bo | 119 | GS6 | Type II | Positive | Positive |
| B-ole-someBnap | 121 | GS8 | Type II | Neutral | Neutral |
| B-napus2-1 | 123 | GS9 | Type II | Neutral | Positive |
| D7MLB3_Al | 127 | GS1 | Type II | Positive | Positive |
| R0I9H0_Cr | 129 | GS2 | Type II | Neutral | Positive |
| R0EXR3_Cr | 130 | GS4 | Type II | Positive | Positive |
| M4F4A4_Bp | 131 | GS5 | Type II | Positive | Positive |
| M4EKG1_Bp | 132 | GS7 | Type II | Neutral | Neutral |
| GSVIVT01010672001 | 135 | GS10 | Type II | Neutral | Neutral |

### Example 29A

### ABA Sensitivity Assay

### Root Architecture Assay in Arabidopsis

[0650] To test transgenic plants for alteration in root architecture in response to ABA, the root architecture assay is done as described in this example.

[0651] Seeds are sterilized using 50% household bleach 0.01% Triton X-100 solution and on petri plates containing the following medium: 0.5×N-Free Hoagland's, 8 mM KNO₃, 1% sucrose, 1 mM MES and 1% PHYTAGEL™, supplemented with 0.1 μM ABA, at a density of 4 seeds/plate. Typically 10 plates are placed in a rack. Plates are kept for three days at 4° C. to stratify seeds and then held vertically for 12 days at 22° C. light and 20° C. dark. Photoperiod is 16 h; 8 h dark, average light intensity is ˜180 μmol/m²/s. Racks (typically holding 10 plates each) are rotated every alternate day within each shelf. At day 12, plates are evaluated for seedling status, whole plate scan are taken, and analyzed for root area.

[0652] These seedlings grown on vertical plates are analyzed for root growth with the software WINRHIZO® (Regent Instruments Inc), an image analysis system specifically designed for root measurement. WINRHIZO® uses the contrast in pixels to distinguish the light root from the darker background. To identify the maximum amount of roots without picking up background, the pixel classification is kept at 150-170 and the filter feature is used to remove objects that have a length/width ratio less than 10.0. The area on the plates analyzed is from the edge of the plant's leaves to about 1 cm from the bottom of the plate. The exact same WINRHIZO® settings and area of analysis is used to analyze all plates within a batch. The total root length score given by WINRHIZO® for a plate is divided by the number of plants that have germinated and have grown halfway down the plate. Eight plates for every line are grown and their scores are averaged. This average is then compared to the average of eight plates containing wild type seeds that have been grown at the same time.

[0653] Thirty seedlings from transgenic are compared to same number in control and probability value was generated. Transgenics with probability value (p-value) equal to and or more than E-03 is considered is validated in RA assay.

### Example 29B

### Root Architecture Assay for Transgenic AT-DTP4 Arabidopsis Plants

[0654] The Arabidopsis DTP4 polypeptide gene (At5g62180; SEQ ID NO:16; NCBI GI No. 30697645) was tested for its ability to confer altered ABA sensitivity or in the following manner.

[0655] T3 seeds from seven single insertion events (named E3, E4, E5, E6, E7, E8 and E9) from transgenic Arabidopsis line with AT-DTP4 protein, containing the 35S promoter::At expression construct pBC-yellow-At5g62180, generated as described in Example 6, were tested for alteration of root architecture due to presence of ABA in the media, as described in Example 27A.

[0656] Non-transformed Columbia seeds grown in the same conditions and at the same time of the single insertion events served as a control. Single line event and control seeds were subjected to the Root Architecture Assay, to test ABA sensitivity, following the procedure described in Example 29A.

[0657] Eight plates having 32 seedlings were scanned, and the pixel values obtained for each of the 32 roots of each event was compared with the pixel values obtained for the control.

[0658] T-test analysis was performed to show that the AT-DTP4 transgenic plants have better root growth under 0.1 μM ABA, indicating altered ABA sensitivity as compared to the wt plants.

[0659] The p-value for different events, done as 2 different experiments on 2 different days, is given in Table 10. The ones with probability value (p-value) equal to and or more than E-03 are shown in bold.

TABLE 10
P-values for RA Assay with AT-DTP4 Transgenic Plants

| Events | ttest (experiment 1) | ttest (experiment 2) |
|---|---|---|
| E3 | 5.77E−01 | 1.29E−01 |
| E4 | 5.14E−04 | 4.69E−02 |
| E5 | 6.36E−01 | 8.3E−01 |
| E6 | 3.43E−07 | 1.11E−07 |
| E7 | 2.08E−02 | 1.21E−01 |
| E8 | 3.92E−04 | 3.12E−03 |
| E9 | 8.22E−07 | 6.27E−05 |

### Example 30

### Detection of DTP4 Protein in Transgenic Maize Leaves by Mass Spectrometry

[0660] The transgenic maize events from the two constructs used in the field yield trials described in Example 19 were regrown in a growth chamber until stage V5 to provide leaf samples for detection of DTP4 protein by mass spectrometry. Leaves were excised and ground in liquid nitrogen, and then the frozen powder was lyophilized. The protein from 10 mg of lyophilized leaf powder per sample was extracted and subjected to analysis by mass spectrometry. AT-DTP4 protein was detected in all 8 events of the pCV-DTP4ac construct.

[0661] Field grown transgenic events for construct pCV-DTP4ac were also used for DTP4 protein detection by the same mass spec method (FIG. 17). The DTP4 protein was detected in V9 leaves of all transgenic events, but not in leaves of null plants. The greatest amount of DTP4 protein in the field grown plants was detected in event DTP4-L17, as was observed with the data for growth chamber grow plants.

### Example 31

### Tiller Number Assay with Transgenic Maize Plants Overexpressing AT-DTP4ac Tiller Production Under Field Conditions

[0662] The AT-DTP4 (pCV-DTP4ac) was introduced into a transformable maize line derived from an elite maize inbred line.

[0663] Six transgenic events were field tested at 2 locations A (Flowering stress) and B (Well-watered) in 2014. The trials were field physiological frame work. At the location A, mild drought conditions were imposed during flowering. The “B” location was well-watered. Tiller number data were collected in all locations, with 4 replicates per location. Tiller number per plant was counted for 20 plants in the middle of plot.

[0664] Tiller number (tiller number per plant) for the 6 transgenic events is shown in FIG. 18. Tiller number per plant of transgenic plants was significantly greater than construct null (CN).

### Example 32

### ABA Sensitivity Assay

### Root and Shoot Growth Assay with AT-DTP4ac Polypeptide in Maize

[0665] As described in Examples 5, 7, and 25, overexpressing DTP4 in Arabidopsis resulted in increased sensitivity to ABA. To determine whether transgenic maize plants overexpressing AT-DTP4 (SEQ ID NO:18) were also ABA hypersensitive, a maize ABA assay was performed with transgenic events and corresponding event nulls of construct pCV-DTP4ac. Maize seeds were germinated in paper towel rolls for 4 days in water, and then either no ABA or 10 μM ABA treatments were applied for 7 additional days. Root and shoot growth was measured before and after the ABA treatment, and differences were recorded. A positive control event from another construct known to give ABA hypersensitivity was included. Six replications were done, with 5 seeds per germination roll.

### Materials and Methods

[0666] An experiment with the current protocol was completed in 11 days, starting with germination of seeds in water (0 DAP). After four days germination, five seeds of an entry have initial root and shoot measurements were recorded and were then transferred to an individual germination roll that has been ascribed with a 10 μM or 0 μM ABA treatment (0 DAT). Following an additional 7 days in the growth chamber, final root and shoot measurements were recorded for each roll (7 DAT).

[0667] Traits were averaged over the five plants in a germination roll. Root growth and shoot growth traits were calculated as the difference of the final and initial measurements. Initial measurements were also analyzed to determine if differences were present prior to treatment. Comparisons were conducted between treatments and entries, on the event and construct level using a spatial adjustment. The experimental design was a multi-time split plot with replications sometimes conducted over several days.

[0668] Results:

[0669] Construct level results from 2 different experiments was done on two different days, results are shown in FIG. 19.

[0670] The positive control showed significant decreases in shoot and root growth in the 10 μM ABA treatment, as expected for an ABA hypersensitive control. In contrast, four AT-DTP4ac transgenic events had significantly increased root growth, and no events had significantly decreased shoot growth, suggesting decreased sensitivity to ABA. Thus, overexpressing AT-DTP4 in both Arabidopsis and maize altered ABA sensitivity.

### Example 33

### Triple Stress Assay with Transgenic Maize Plants Overexpressing AT-DTP4ac

[0671] The triple stress assay was used to test AT-DTP4ac and other AT-DTP4 homologs for their ability to confer stress resistance following a drought, light and heat stress combination.

### Material and Methods

[0672] Maize plants were grown to the V4 stage in a growth chamber under conditions of 27° C. daytime/15° C. nighttime temperatures, 15 hour photoperiod, 60% relative humidity and 800 μmol m⁻¹ sec⁻¹ light intensity (Table 11). During this period plants were fertigated to maintain well-watered conditions. After this 21 day period, initial plant measurements (0 days after treatment, or DAT) were recorded prior to “triple stress”, including volumetric soil water content, hyperspectral imaging, and chlorophyll fluorescence. The triple stress was initiated by increasing temperatures to 38° C. daytime/27° C. nighttime, increasing the light intensity 1300 μmol m⁻¹ sec⁻¹, and water was withheld. Measurements were again collected at 3 and 6 days after treatment. At the 6 DAT measurements, plant biomass was destructively harvested for fresh and dry weights. Significant differences were determined for traits at the event and construct level for 12 replicates.

TABLE 11
Experimental Procedure for the Triple Stress Assay

| Date | Event |
|---|---|
| 1 week or less prior to | Pot filling |
| planting | |
| 0 DAP | Planting, Start “Normal” Conditions |
| 7 DAP | Thinning to 1 plant pot⁻¹ |
| 0 DAT or 20 DAP | Initial measurements, Occurs as plants are |
| | under “Normal” Conditions |
| 21 DAP | Growth Chamber Program switches to |
| | “Triple Stress” Program |
| 3 DAT or 24 DAP | Second set of measurements. |
| 6 DAT or 27 DAP | Final set of measurements including destructive |
| | harvest. |

[0673] Results: During triple stress, plants with pCV-DTP4ac had greater leaf area compared to null as measured in pixel area with a hyperspectral camera (FIG. 20). Significant differences were not observed in biomass measurements, soil water content or chlorophyll fluorescence parameters.

[0674] FIG. 20 shows construct level response of plants with pCV-DTP4ac (UBI:AT-DTP4) for leaf area during triple stress. Significant differences are presented at a P<0.1, with black bars indicating significantly positive construct level response, dark grey bars indicate a comparison that is not significantly different. Numbers indicate the percent difference relative to construct null.

### Example 34

### Osmotic Stress Assay with Transgenic Maize Plants Overexpressing AT-DTP4ac

[0675] An osmotic stress assay was used to test the ability of DTP4 polypeptides to confer osmotic stress resistance in transgenic maize plants overexpressing DTP4 polypeptides.

[0676] These experiments are a variation of the osmotic stress assay described in Example 25.

[0677] Material and Methods:

[0678] All experiments were conducted in one Percival growth chamber that is maintained under completely darkened conditions at 25 degrees C., with a relative humidity of 95%. For each experiment, one construct with all available events (transgenics and event nulls) were tested in Nunc Bioassay Plates (245×245×25 mm, approximately 225 ml volume).

[0679] Two treatments were done: control and quad osmotic stress (70% concentration; ψ_{w}=−1.0 MPa)

Each event (transgenic, event null) per treatment contained six replicates.

### Media Preparation:

[0680] Quad Stress (70%) media:
[0681] MS Salt—1.1 g/L
[0682] MES Hydrate-0.3905 g/L
[0683] PEG 8000—70 g/L
[0684] Mannitol—15.94 g/L
[0685] Sorbitol—15.94 g/L
[0686] NaCl—2.557 g/L
[0687] Adjust media to 5.70 with 1 M KOH
[0688] Phytagel—8 g/L
[0689] Control Media:
[0690] MS Salt—1.1 g/L
[0691] MES Hydrate—0.3905 g/L
[0692] Adjust media to 5.70 with 1 M KOH
[0693] Phytagel—8 g/L

[0694] Results: Seed germination data were collected at 24, 32, 48, 56, 72, and 96 hours after plating. The water potentials of the control and quad stress (70% concentration) media were measured via a vapor pressure osmometer at the end of each experiment

[0695] Significant inhibition was found in seed germination in response to quad stress, relative to control at 48-96 h. All available events (total of eight) of PHP51731 were tested twice with reproducible results. AT-DTP4ac transgenic events consistently demonstrated significantly reduced sensitivity to quad stress, relative to null.

[0696] During two experiments, seven of eight transgenic events exhibited significantly reduced germination sensitivity to quad stress, relative to comparable nulls.

[0697] Results are shown in Table 12 and FIG. 21.

TABLE 12
Osmotic Stress Assay With AT-DTP4 Overexpressing Maize Plants

| Construct | Control | Quad Stress |
|---|---|---|
| pCV-DTP4ac | Neutral | Positive (p < 0.05) |

### Example 35

### Tall Clear Tube Root Growth Assay with Transgenic Maize Plants Overexpressing AT-DTP4ac to Evaluate Root and Shoot Development

[0698] This assay was developed and used to evaluate root growth developmental plasticity in transgenic maize plants overexpressing DTP4 polypeptides in response to well-watered and soil drying conditions.

### Material and Methods:

[0699] The experiments were performed in greenhouse. Maize seeds were imbibed on germination paper that was pre-soaked in water for a 48 h period. Uniform maize seedlings (with root lengths between 10-22 mm) were transplanted into clear acrylic tubes (1.5 meters in length, approximately 38 L volume) containing a 3:1 Dynamix to sand media. The soil media was supplemented with Scott's Osmocote Plus (15-9-12) to provide a slow release of nutrients throughout the course of each experiment. For each experiment, one construct with two selected events (transgenic and event null) were tested. Two treatments were done: well watered and drought. The drought cycle was induced between V3-V4 growth stages, for three weeks. Each event (transgenic, event null) per treatment contained 6 replicates.

[0700] Measurements were done to monitor lateral growth development with depth and time, a total of 40 root windows were permanently installed by a custom fabrication vendor, according to design specifications. To delineate the differing depths, each root window has been systematically assigned a number designation. Lateral root growth is monitored on a weekly basis following water withholding by taking a series of photographs of each root window at the different depth increments with a digital camera with an attached polarizing filter. To ensure that standardized photographs were taken, the camera is installed on a customized designed and fabricated acrylic jig. All images were sent for automated quantitative analysis.

[0701] Soil water content measurements: The apparent dielectric constant of the uppermost 100 cm of soil was quantified bi-weekly using a soil moisture probe in all plants during the drought period to better interpret as well as compare the timing and pattern of root development both within as well as between genotypes. Plant growth quantification: plant height and leaf number data were collected bi-weekly, during the drought period. The harvest measurements done were for shoot fresh weight, shoot dry weight, total leaf area, primary root length; data were collected for all plants.

TABLE 13
Tall Clear Tube Root Assay With AT-DTP4 Overexpressing Maize Plants

| Construct | Promoter | Events | Treatment | Major Difference |
|---|---|---|---|---|
| pCV- | ZM-UBI | DTP4-L17 (TG, | WW, Soil | TG positive |
| DTP4ac | | event null) | drying | produced more |
| | | | | tillers, under WW |
| | | | | conditions, |
| | | | | relative to null |
| | | DTP4-L16 (TG, | WW, Soil | TG positive |
| | | event null) | drying | produced more |
| | | | | tillers, under WW |
| | | | | conditions, |
| | | | | relative to null |

### Example 36

### Expression of AT-DTP4 Fusion Protein in E. coli

### Protein Purification and Esterase Activity Assays

[0702] The pET28a expression vector was used to express AT-DTP4 fusion protein containing 20 additional N-terminal amino acids, including a 6 histidine tag. The amino acid sequence of the fusion protein is presented as SEQ ID NO:629. E. coli cultures were grown at 37° C. in 2×YT media to an OD₆₀₀ₙₘ of 0.6. Transgene expression was then induced with 0.5 mM IPTG and the culture was grown an additional 20 hours at 20° C. The fusion protein was purified from E. coli extracts using cobalt affinity chromatography, and a high degree of purity was achieved. Aliquots of the purified protein were stored frozen at −80° C. in 10% glycerol. Aliquots were then thawed and dialyzed against 50 mM Tris-HCl pH 8, prior to performing esterase activity assays with p-nitrophenyl acetate as substrate.

[0703] Esterase activity with this substrate was monitored by observing an increase in absorbance at a wavelength of 405 nm, because the p-nitrophenol product absorbs at 405 nm. The activity assays were done with 1 μg of protein in 50 mM Tris-HCl, pH 8, with an assay volume of 200 μl, using 96 well flat bottom microtiter plates. Control reactions without enzyme were done and rates were subtracted from the plus enzyme reaction rates to correct for autohydrolysis of substrate. The purified AT-DTP4 protein had obvious esterase activity with p-nitrophenyl acetate as substrate (FIG. 23). Dialyzed protein was quantitated by absorbance at 280 nm, using a value of 1 OD (280 nm)=0.92 mg/ml.

### Example 37

### Traits Observed in Field Plots in Transgenic Maize Plants Overexpressing AT-DTP4 Polypeptide

[0704] Field plots were observed in well watered conditions with transgenic maize plants transformed with pCV-DTP4ac. A randomized complete block design was used with 2 row plots and 4 field replications. Five consecutive evenly spaced plants in each row were tagged for observation, for a total of 10 plants per plot. In some plots, fewer than 10 plants were used for observations. For one trait, tiller number at V12, all the plants of a plot were used, except for the end plant on each side of each row. For another trait, stalk diameter, only 3 events were measured. Descriptions of the traits measured, a summary of the results are presented in Table 14, and detailed results are presented in Table 15. At the construct level, small but statistically significant differences from nulls were observed for several traits, including decreases in plant height at V12, leaf number at V9, and growth rate from V9 to V12. Increased tiller number was observed at V12. Pollen shed was about half a day later, and because silks emerged before pollen shed in these well watered conditions, the ASI was negative and larger due to the delayed shed.

TABLE 14
Trait Description and Result Summary in Field Plots

| | | Significant |
|---|---|---|
| | | difference |
| | | from null |
| | | (construct |
| Trait | Description | level) |
| PLTHT.V9 | Plant height (cm) at V9, to top leaf collar | No |
| LFN.V9 | Leaf number with visible collar at V9 | Yes; |
| | | decreased |
| TILN.V12 | Tiller number at V12 | Yes; |
| | | increased |
| PLTHT.V12 | Plant height (cm) at V12, to top leaf | Yes; |
| | collar | decreased |
| LFN.V12 | Leaf number with visible collar at V12 | No |
| PLTHT.V17 | Plant height (cm) at V17 to V18, to top | No |
| | leaf collar | |
| GR.V9V12 | Growth rate (cm/day) from June 23 to | Yes; |
| | July 3 (V9 to V12). | decreased |
| GR.V12V17 | Growth rate (cm/day) from June 23 to | No |
| | July 3 (V9 to V12). | |
| SHED | First pollen shed for 50% of plants in | Yes; later |
| | plot, days after planting | |
| SILK | First silk emergence for 50% of plants in | No |
| | plot, days after planting | |
| ASI | Anthesis to silk interval (silk date - shed | Yes; larger |
| | date) | |
| PLTHT.R3 | Plant height (cm), final, to bottom of | No |
| | tassel | |
| EARHT | Ear height (cm) | No |
| LFN.R3 | Leaf number, final | No |
| EARLP | Ear leaf position | No |
| STKD | Stalk diameter (cm), perpendicular to | No |
| | groove, mid internode below ear | |
| STAGRN.ER4 | Stay green, lowest leaf that is >50% | No |
| | green, ear leaf position = 0, Very early | |
| | R4. | |
| STAGRN.R4 | Stay green, lowest leaf that is >50% | No |
| | green, ear leaf position = 0. R4. | |

TABLE 15
Traits Observed In Field Plots

| | | | | | significantly |
|---|---|---|---|---|---|
| | | | | | different |
| | | | | | from |
| | | | | | null (** p |
| | | | | | value <0.05; |
| | | mean | Difference | | * p Value |
| Trait | Event | value | from null | p Value | <0.1) |
| PLTHT.V9 | DTP4-L10 | 50.07 | −1.51 | 0.182 | |
| PLTHT.V9 | DTP4-L11 | 50.41 | −1.17 | 0.308 | |
| PLTHT.V9 | DTP4-L12 | 50.69 | −0.90 | 0.449 | |
| PLTHT.V9 | DTP4-L13 | 51.69 | 0.10 | 0.928 | |
| PLTHT.V9 | DTP4-L14 | 50.27 | −1.32 | 0.234 | |
| PLTHT.V9 | DTP4-L15 | 50.91 | −0.68 | 0.567 | |
| PLTHT.V9 | DTP4-L16 | 51.94 | 0.36 | 0.747 | |
| PLTHT.V9 | DTP4-L17 | 50.18 | −1.40 | 0.226 | |
| PLTHT.V9 | Construct | 50.77 | −0.82 | 0.402 | |
| PLTHT.V9 | null | 51.59 | 0.00 | | |
| LFN.V9 | DTP4-L10 | 8.89 | −0.11 | 0.012 | ** |
| LFN.V9 | DTP4-L11 | 8.82 | −0.19 | 0.000 | ** |
| LFN.V9 | DTP4-L12 | 8.94 | −0.06 | 0.163 | |
| LFN.V9 | DTP4-L13 | 8.97 | −0.04 | 0.393 | |
| LFN.V9 | DTP4-L14 | 8.90 | −0.10 | 0.016 | ** |
| LFN.V9 | DTP4-L15 | 8.92 | −0.08 | 0.083 | * |
| LFN.V9 | DTP4-L16 | 8.97 | −0.04 | 0.409 | |
| LFN.V9 | DTP4-L17 | 8.88 | −0.12 | 0.007 | ** |
| LFN.V9 | Construct | 8.91 | −0.09 | 0.018 | ** |
| LFN.V9 | null | 9.00 | 0.00 | | |
| TILN.V12 | DTP4-L10 | 0.07 | 0.06 | 0.035 | ** |
| TILN.V12 | DTP4-L11 | 0.06 | 0.06 | 0.063 | * |
| TILN.V12 | DTP4-L12 | 0.07 | 0.06 | 0.051 | * |
| TILN.V12 | DTP4-L13 | 0.06 | 0.05 | 0.115 | |
| TILN.V12 | DTP4-L14 | 0.09 | 0.08 | 0.013 | ** |
| TILN.V12 | DTP4-L15 | 0.07 | 0.06 | 0.039 | ** |
| TILN.V12 | DTP4-L16 | 0.09 | 0.08 | 0.009 | ** |
| TILN.V12 | DTP4-L17 | 0.14 | 0.13 | 0.000 | ** |
| TILN.V12 | Construct | 0.08 | 0.07 | 0.006 | ** |
| TILN.V12 | null | 0.01 | 0.00 | | |
| PLTHT.V12 | DTP4-L10 | 98.99 | −3.28 | 0.033 | ** |
| PLTHT.V12 | DTP4-L11 | 99.11 | −3.16 | 0.042 | ** |
| PLTHT.V12 | DTP4-L12 | 98.68 | −3.59 | 0.024 | ** |
| PLTHT.V12 | DTP4-L13 | 99.60 | −2.67 | 0.080 | * |
| PLTHT.V12 | DTP4-L14 | 98.72 | −3.55 | 0.020 | ** |
| PLTHT.V12 | DTP4-L15 | 99.19 | −3.08 | 0.050 | * |
| PLTHT.V12 | DTP4-L16 | 99.86 | −2.41 | 0.112 | |
| PLTHT.V12 | DTP4-L17 | 99.01 | −3.25 | 0.036 | ** |
| PLTHT.V12 | Construct | 99.14 | −3.12 | 0.026 | ** |
| PLTHT.V12 | null | 102.27 | 0.00 | | |
| LFN.V12 | DTP4-L10 | 11.75 | −0.13 | 0.162 | |
| LFN.V12 | DTP4-L11 | 11.73 | −0.15 | 0.111 | |
| LFN.V12 | DTP4-L12 | 11.73 | −0.14 | 0.120 | |
| LFN.V12 | DTP4-L13 | 11.77 | −0.11 | 0.232 | |
| LFN.V12 | DTP4-L14 | 11.76 | −0.11 | 0.214 | |
| LFN.V12 | DTP4-L15 | 11.74 | −0.13 | 0.147 | |
| LFN.V12 | DTP4-L16 | 11.78 | −0.10 | 0.268 | |
| LFN.V12 | DTP4-L17 | 11.76 | −0.12 | 0.198 | |
| LFN.V12 | Construct | 11.75 | −0.12 | 0.145 | |
| LFN.V12 | null | 11.88 | 0.00 | | |
| PLTHT.V17 | DTP4-L10 | 195.38 | −1.80 | 0.400 | |
| PLTHT.V17 | DTP4-L11 | 195.26 | −1.92 | 0.376 | |
| PLTHT.V17 | DTP4-L12 | 194.76 | −2.42 | 0.275 | |
| PLTHT.V17 | DTP4-L13 | 196.13 | −1.05 | 0.621 | |
| PLTHT.V17 | DTP4-L14 | 194.78 | −2.40 | 0.257 | |
| PLTHT.V17 | DTP4-L15 | 195.97 | −1.21 | 0.582 | |
| PLTHT.V17 | DTP4-L16 | 196.36 | −0.82 | 0.699 | |
| PLTHT.V17 | DTP4-L17 | 194.82 | −2.36 | 0.278 | |
| PLTHT.V17 | Construct | 195.43 | −1.75 | 0.367 | |
| PLTHT.V17 | null | 197.18 | 0.00 | | |
| GR.V9V12 | DTP4-L10 | 4.84 | −0.22 | 0.006 | ** |
| GR.V9V12 | DTP4-L11 | 4.84 | −0.22 | 0.006 | ** |
| GR.V9V12 | DTP4-L12 | 4.84 | −0.22 | 0.006 | ** |
| GR.V9V12 | DTP4-L13 | 4.84 | −0.22 | 0.006 | ** |
| GR.V9V12 | DTP4-L14 | 4.84 | −0.22 | 0.006 | ** |
| GR.V9V12 | DTP4-L15 | 4.84 | −0.22 | 0.006 | ** |
| GR.V9V12 | DTP4-L16 | 4.84 | −0.22 | 0.006 | ** |
| GR.V9V12 | DTP4-L17 | 4.84 | −0.22 | 0.006 | ** |
| GR.V9V12 | Construct | 4.84 | −0.22 | 0.006 | ** |
| GR.V9V12 | null | 5.06 | 0.00 | | |
| GR.V12V17 | DTP4-L10 | 8.76 | 0.12 | 0.170 | |
| GR.V12V17 | DTP4-L11 | 8.75 | 0.12 | 0.183 | |
| GR.V12V17 | DTP4-L12 | 8.75 | 0.12 | 0.188 | |
| GR.V12V17 | DTP4-L13 | 8.76 | 0.12 | 0.167 | |
| GR.V12V17 | DTP4-L14 | 8.75 | 0.12 | 0.184 | |
| GR.V12V17 | DTP4-L15 | 8.76 | 0.13 | 0.155 | |
| GR.V12V17 | DTP4-L16 | 8.76 | 0.12 | 0.170 | |
| GR.V12V17 | DTP4-L17 | 8.75 | 0.11 | 0.202 | |
| GR.V12V17 | Construct | 8.76 | 0.12 | 0.168 | |
| GR.V12V17 | null | 8.64 | 0.00 | | |
| PLTHT.R3 | DTP4-L10 | 264.02 | −0.66 | 0.703 | |
| PLTHT.R3 | DTP4-L11 | 264.02 | −0.66 | 0.703 | |
| PLTHT.R3 | DTP4-L12 | 264.02 | −0.66 | 0.703 | |
| PLTHT.R3 | DTP4-L13 | 264.02 | −0.66 | 0.703 | |
| PLTHT.R3 | DTP4-L14 | 264.02 | −0.66 | 0.703 | |
| PLTHT.R3 | DTP4-L15 | 264.02 | −0.66 | 0.703 | |
| PLTHT.R3 | DTP4-L16 | 264.02 | −0.66 | 0.703 | |
| PLTHT.R3 | DTP4-L17 | 264.02 | −0.66 | 0.703 | |
| PLTHT.R3 | Construct | 264.02 | −0.66 | 0.703 | |
| PLTHT.R3 | null | 264.68 | 0.00 | | |
| EARHT | DTP4-L10 | 105.34 | 1.98 | 0.243 | |
| EARHT | DTP4-L11 | 105.34 | 1.98 | 0.243 | |
| EARHT | DTP4-L12 | 105.34 | 1.98 | 0.243 | |
| EARHT | DTP4-L13 | 105.34 | 1.98 | 0.243 | |
| EARHT | DTP4-L14 | 105.34 | 1.98 | 0.243 | |
| EARHT | DTP4-L15 | 105.34 | 1.98 | 0.243 | |
| EARHT | DTP4-L16 | 105.34 | 1.98 | 0.243 | |
| EARHT | DTP4-L17 | 105.34 | 1.98 | 0.243 | |
| EARHT | Construct | 105.34 | 1.98 | 0.243 | |
| EARHT | null | 103.36 | 0.00 | | |
| LFN.R3 | DTP4-L10 | 18.63 | −0.24 | 0.024 | ** |
| LFN.R3 | DTP4-L11 | 18.67 | −0.20 | 0.060 | |
| LFN.R3 | DTP4-L12 | 18.79 | −0.08 | 0.460 | |
| LFN.R3 | DTP4-L13 | 18.84 | −0.03 | 0.793 | |
| LFN.R3 | DTP4-L14 | 18.83 | −0.04 | 0.655 | |
| LFN.R3 | DTP4-L15 | 18.85 | −0.02 | 0.870 | |
| LFN.R3 | DTP4-L16 | 18.83 | −0.04 | 0.722 | |
| LFN.R3 | DTP4-L17 | 18.84 | −0.03 | 0.789 | |
| LFN.R3 | Construct | 18.79 | −0.08 | 0.344 | |
| LFN.R3 | null | 18.87 | 0.00 | | |
| EARLP | DTP4-L10 | 11.89 | −0.01 | 0.927 | |
| EARLP | DTP4-L11 | 11.92 | 0.02 | 0.793 | |
| EARLP | DTP4-L12 | 11.95 | 0.06 | 0.527 | |
| EARLP | DTP4-L13 | 11.95 | 0.06 | 0.521 | |
| EARLP | DTP4-L14 | 12.01 | 0.12 | 0.192 | |
| EARLP | DTP4-L15 | 11.93 | 0.04 | 0.672 | |
| EARLP | DTP4-L16 | 11.96 | 0.07 | 0.455 | |
| EARLP | DTP4-L17 | 11.95 | 0.05 | 0.564 | |
| EARLP | Construct | 11.95 | 0.05 | 0.523 | |
| EARLP | null | 11.89 | 0.00 | | |
| Shed | DTP4-L10 | 70.37 | 0.40 | 0.215 | |
| Shed | DTP4-L11 | 70.37 | 0.40 | 0.215 | |
| Shed | DTP4-L12 | 70.46 | 0.49 | 0.126 | |
| Shed | DTP4-L13 | 70.27 | 0.30 | 0.342 | |
| Shed | DTP4-L14 | 70.46 | 0.49 | 0.126 | |
| Shed | DTP4-L15 | 70.65 | 0.68 | 0.037 | ** |
| Shed | DTP4-L16 | 70.27 | 0.30 | 0.342 | |
| Shed | DTP4-L17 | 70.65 | 0.68 | 0.037 | ** |
| Shed | Construct | 70.44 | 0.47 | 0.095 | * |
| Shed | null | 69.97 | 0.00 | | |
| Silk | DTP4-L10 | 69.55 | 0.05 | 0.877 | |
| Silk | DTP4-L11 | 69.58 | 0.08 | 0.799 | |
| Silk | DTP4-L12 | 69.61 | 0.11 | 0.723 | |
| Silk | DTP4-L13 | 69.55 | 0.05 | 0.877 | |
| Silk | DTP4-L14 | 69.61 | 0.11 | 0.723 | |
| Silk | DTP4-L15 | 69.61 | 0.11 | 0.723 | |
| Silk | DTP4-L16 | 69.55 | 0.05 | 0.877 | |
| Silk | DTP4-L17 | 69.67 | 0.17 | 0.579 | |
| Silk | Construct | 69.59 | 0.09 | 0.757 | |
| Silk | null | 69.51 | 0.00 | | |
| ASI | DTP4-L10 | −0.84 | −0.42 | 0.063 | * |
| ASI | DTP4-L11 | −0.84 | −0.42 | 0.063 | * |
| ASI | DTP4-L12 | −0.84 | −0.42 | 0.063 | * |
| ASI | DTP4-L13 | −0.84 | −0.42 | 0.063 | * |
| ASI | DTP4-L14 | −0.84 | −0.42 | 0.063 | * |
| ASI | DTP4-L15 | −0.84 | −0.42 | 0.063 | * |
| ASI | DTP4-L16 | −0.84 | −0.42 | 0.063 | * |
| ASI | DTP4-L17 | −0.84 | −0.42 | 0.063 | * |
| ASI | Construct | −0.84 | −0.42 | 0.063 | * |
| ASI | null | −0.43 | 0.00 | | |
| STKD | DTP4-L13 | 17.18 | −0.13 | 0.275 | |
| STKD | DTP4-L16 | 17.18 | −0.13 | 0.275 | |
| STKD | DTP4-L17 | 17.18 | −0.13 | 0.275 | |
| STKD | Construct | 17.18 | −0.13 | 0.275 | |
| STKD | null | 17.31 | 0.00 | | |
| STAGRN.ER4 | DTP4-L10 | −3.41 | −0.08 | 0.476 | |
| STAGRN.ER4 | DTP4-L11 | −3.41 | −0.08 | 0.476 | |
| STAGRN.ER4 | DTP4-L12 | −3.41 | −0.08 | 0.476 | |
| STAGRN.ER4 | DTP4-L13 | −3.41 | −0.08 | 0.476 | |
| STAGRN.ER4 | DTP4-L14 | −3.41 | −0.08 | 0.476 | |
| STAGRN.ER4 | DTP4-L15 | −3.41 | −0.08 | 0.476 | |
| STAGRN.ER4 | DTP4-L16 | −3.41 | −0.08 | 0.476 | |
| STAGRN.ER4 | DTP4-L17 | −3.41 | −0.08 | 0.476 | |
| STAGRN.ER4 | Construct | −3.41 | −0.08 | 0.476 | |
| STAGRN.ER4 | null | −3.32 | 0.00 | | |
| STAGRN.R4 | DTP4-L10 | −2.26 | −0.23 | 0.129 | |
| STAGRN.R4 | DTP4-L11 | −2.15 | −0.12 | 0.447 | |
| STAGRN.R4 | DTP4-L12 | −2.20 | −0.17 | 0.296 | |
| STAGRN.R4 | DTP4-L13 | −2.10 | −0.07 | 0.664 | |
| STAGRN.R4 | DTP4-L14 | −2.14 | −0.11 | 0.476 | |
| STAGRN.R4 | DTP4-L15 | −2.25 | −0.22 | 0.165 | |
| STAGRN.R4 | DTP4-L16 | −2.04 | −0.01 | 0.950 | |
| STAGRN.R4 | DTP4-L17 | −2.27 | −0.24 | 0.124 | |
| STAGRN.R4 | Construct | −2.18 | −0.15 | 0.272 | |
| STAGRN.R4 | null | −2.03 | 0.00 | | |

### Example 38

### Traits Observed in Field Pots

[0705] In addition to the field plots described in Example 37, a field pot study was also performed at a well-watered location. Growing maize plants in pots allowed the option of imposing drought stress in a well-watered location by irrigating less, because plants in pots received more water from irrigation than from rainfall, due to the small neck size of the pots and the fact that water drained quickly from pots. The pots were 10 liter volume, 7.75″×18″ square treepots. A split plot design was used, with treatment being the whole plot, event the split plot, and transgenic event and event null the split plot. So throughout the experiment, each event was adjacent to its corresponding event null. There were six pots per replication, comprising three transgenic events and the three corresponding event nulls. 30 replications in the well watered treatment and 30 replications in the drought stressed treatment were done. In each treatment, 15 of the 30 reps were harvested at R1, and the other 15 reps were harvested at R6. Descriptions of the traits measured, and a summary of the results for the pot study are presented in Table 16, and results are presented in Table 17. At the construct level in the well watered treatment, significant differences from nulls were observed for the following traits: increased tiller number at V4 and V6, reduced plant height at V10, V13, V16, and R1, reduced leaf number at V10, decreased growth rate from V6 to V10, decreased flavonols, decreased water use efficiency, decreased dry weight of the main shoot at R1, increased dry weight of tillers at R1, delayed shed and silk time, and increased vegetative dry weight at R6. At the construct level in the drought stressed treatment, significant differences from nulls were observed for the following traits: increased tillers at V4 and V6, decreased plant height at V6, V10, and V13, decreased leaf number at V10, V13, and at maturity, decreased flavonols, decreased dry weight of the main shoot at R1, increased dry weight of tillers and ear at R1, earlier silking time, decreased ASI, decreased yellow leaves (increased stay green) at 3 dates, decreased vegetative dry weight at R6, and increased dry weight of kernels (yield), ear, kernel number, and harvest index at R6. A summary is given in Table 16, and the numbers for different events are given in Table 17.

[0706] Significance of many of these traits in determining plant health, yield and biomass are well known in the art. For example, chlorophyll and flavonol measurement using Dualex instrument, measurement of other traits such as harvest index, water use efficiency, plant height, dry weight, kernel weight etc is well known in the art (Cerovic et al Physiologia Plantarum 146: 251-260. 2012; Sinclair, T. R.; Crop Sci. 38:638-643(1998), Edmeades et al (1999) Crop Sci. 39:1306-1315, Andrade et al Crop Sci. 42:1173-1179 (2002), Berke et al (1995) Crop Sci. 39:1542-1549, Garwood et al Crop Science, Vol. 10, January-February 1970).

TABLE 16
Trait Descriptions for Field Pot Study

| | | Significant | Significant |
|---|---|---|---|
| | | difference from | difference from |
| | | null in ww | null in drought |
| Trait | Trait description | (construct level) | (construct level) |
| TILN.V4 | Tiller number at V4 | Yes; increased | Yes; increased |
| PLTHT.V6 | Plant height (cm) at V6 | No | Yes; decreased |
| LFN.V6 | Leaf number with visible collar | No | No |
| | at V6 | | |
| TILN.V6 | Tiller number at V6 | Yes; increased | Yes; increased |
| PLTHT.V10 | Plant height (cm) at V10 | Yes; decreased | Yes; decreased |
| LFN.V10 | Leaf number with visible collar | Yes; decreased | Yes; decreased |
| | at V10 | | |
| PLTHT.V13 | Plant height (cm) at V13 | Yes; decreased | Yes; decreased |
| LFN.V13 | Leaf number with visible collar | Yes; decreased | No |
| | at V13 | | |
| PLTHT.V16 | Plant height (cm), about V16 | Yes; decreased | No |
| | and V15 for WW and DRT. | | |
| DUALEX.CHL | Chlorophyll by Dualex | No | No |
| | instrument, near middle of | | |
| | 11th leaf. | | |
| DUALEX.FLV | Flavonols by Dualex | Yes; decreased | Yes; decreased |
| | instrument, near middle of | | |
| | 11th leaf. | | |
| DUALEX.NBI | Nitrogen band index by Dualex | No | No |
| | instrument, near middle of | | |
| | 11th leaf. | | |
| RWC | Relative water content (%), | ND | No |
| | 10th leaf, R1 DRT pots | | |
| WU | Water use (initial pot weight − | No | ND |
| | 24 hr pot weight, WW R1) | | |
| WUE | Water use/total biomass | Yes; decreased | ND |
| PLTHT.R1 | Plant height (cm) at R1 | Yes; decreased | No |
| PLTHT.R6 | Plant height (cm) at R6 | ND | ND |
| EARHT | Ear height (cm), final | No | No |
| LFN | Leaf number, final | No | Yes; decreased |
| EARLP | Position of ear leaf (done for | No | Yes; negative |
| | R6 plants only) | | |
| DWMAIN.R1 | Dry weight of main plant at R1 | Yes; decreased | Yes; decreased |
| DWTIL.R1 | Dry weight of tillers at R1 | Yes; increased | Yes; increased |
| DWVEG.R1 | Dry weight of mainplant and | Yes; decreased | No |
| | tillers, minus ear, R1 | | |
| DWEAR.R1 | Dry weight of primary ear at | Yes; decreased | Yes, increased |
| | R1 | | |
| DWTOT.R1 | Dry weight of total plant at R1 | Yes; decreased | No |
| SHED | First pollen shed | Yes; delayed | No |
| SILK | First silk emergence | Yes, delayed | Yes; earlier |
| ASI | Silk date − shed date | No | Yes; decreased |
| GR.V6V10 | Growth rate (cm/day) from | Yes; decreased | Yes; decreased |
| | June 18 to July 1 (V6 to V10) | | |
| GR.V10V13 | Growth rate (cm/day) from | No | No |
| | July 1 to July 9 (V10 to V13) | | |
| YL.date 1 | Number of leaves >50% | ND | Yes; decreased |
| | yellow on date 1 | | |
| YL.date 2 | Number of leaves >50% | ND | Yes; decreased |
| | yellow on date 2 | | |
| YL.date 3 | Number of leaves >50% | ND | Yes; decreased |
| | yellow on date 3 | | |
| DWVEG.R6 | Dry weight (g) at R6 of all | Yes; increased | Yes; decreased |
| | plant parts except for ear | | |
| ROW | Rows of kernels (rows are the | No | No |
| | long way) | | |
| DWK | Dry weight of kernels (g). | No | Yes; increased |
| | (yield) | | |
| DWCOB | Dry weight of cob (g) (by math, | No | No |
| | DWEAR − DWK) | | |
| DWEAR | Dry weight of ear (g) | No | Yes; increased |
| KN | Kernel number | No | Yes; increased |
| X100KW | 100 kernel dry weight (g) | No | No |
| DWTOT | Dry weight of total plant (by | No | No |
| | math, DWVEG.R6 + EARW) | | |
| HI | Harvest index, DWK/DWTOT | No | Yes; increased at |
| | | | R6 |

ND: “not determined”

TABLE 17
Traits Observed in Field Pots.

| | | | | Event | | | |
|---|---|---|---|---|---|---|---|
| | | | Event or | null or | | | significantly |
| TREAT- | | Event or | construct | construct | Difference | | different |
| MENT | TRAIT | construct | mean | null mean | from null | p Value | from null |
| WW | TILN.V4 | DTP4-L13 | 1.26 | 0.97 | 0.29 | 0.10061240 | |
| WW | TILN.V4 | DTP4-L16 | 1.37 | 0.97 | 0.40 | 0.02068587 | ** |
| WW | TILN.V4 | DTP4-L17 | 1.36 | 0.94 | 0.42 | 0.01560281 | ** |
| WW | TILN.V4 | Construct | 1.33 | 0.96 | 0.37 | 0.00027952 | ** |
| WW | PLTHT.V6 | DTP4-L13 | 22.37 | 22.21 | 0.16 | 0.57160892 | |
| WW | PLTHT.V6 | DTP4-L16 | 21.98 | 22.05 | −0.06 | 0.82730554 | |
| WW | PLTHT.V6 | DTP4-L17 | 21.50 | 22.13 | −0.83 | 0.02710131 | ** |
| WW | PLTHT.V6 | Construct | 21.95 | 22.13 | −0.18 | 0.28166786 | |
| WW | LFN.V6 | DTP4-L13 | 5.93 | 5.83 | 0.10 | 0.24382458 | |
| WW | LFN.V6 | DTP4-L16 | 5.83 | 5.83 | 0.00 | 1.00000000 | |
| WW | LFN.V6 | DTP4-L17 | 5.86 | 5.93 | −0.07 | 0.42198554 | |
| WW | LFN.V6 | Construct | 5.88 | 5.87 | 0.01 | 0.83305644 | |
| WW | TILN.V6 | DTP4-L13 | 2.69 | 2.37 | 0.33 | 0.01376576 | ** |
| WW | TILN.V6 | DTP4-L16 | 2.67 | 2.27 | 0.40 | 0.00242878 | ** |
| WW | TILN.V6 | DTP4-L17 | 2.66 | 2.40 | 0.26 | 0.05289162 | * |
| WW | TILN.V6 | Construct | 2.67 | 2.34 | 0.33 | 0.00002468 | ** |
| WW | PLTHT.V10 | DTP4-L13 | 88.91 | 90.98 | −2.07 | 0.05629611 | * |
| WW | PLTHT.V10 | DTP4-L16 | 87.84 | 91.09 | −3.25 | 0.00269623 | ** |
| WW | PLTHT.V10 | DTP4-L17 | 82.85 | 89.11 | −6.46 | 0.00000001 | ** |
| WW | PLTHT.V10 | Construct | 86.47 | 90.39 | −3.93 | 0.00000000 | ** |
| WW | LFN.V10 | DTP4-L13 | 10.04 | 10.07 | −0.03 | 0.61109281 | |
| WW | LFN.V10 | DTP4-L16 | 9.93 | 9.97 | −0.03 | 0.58640533 | |
| WW | LFN.V10 | DTP4-L17 | 9.83 | 10.00 | −0.17 | 0.00599107 | ** |
| WW | LFN.V10 | Construct | 9.93 | 10.01 | −0.08 | 0.02779416 | ** |
| WW | PLTHT.V13 | DTP4-L13 | 137.88 | 139.92 | −2.05 | 0.10694161 | |
| WW | PLTHT.V13 | DTP4-L16 | 138.94 | 139.32 | −2.37 | 0.05908537 | * |
| WW | PLTHT.V13 | DTP4-L17 | 130.10 | 137.89 | −7.79 | 0.00000001 | ** |
| WW | PLTHT.V13 | Construct | 134.97 | 139.04 | −4.07 | 0.00000012 | ** |
| WW | LFN.V13 | DTP4-L13 | 13.04 | 13.07 | −0.03 | 0.66799636 | |
| WW | LFN.V13 | DTP4-L16 | 12.97 | 13.00 | −0.03 | 0.64259662 | |
| WW | LFN.V13 | DTP4-L17 | 12.90 | 13.03 | −0.14 | 0.06236167 | * |
| WW | LFN.V13 | Construct | 12.97 | 13.03 | −0.07 | 0.11105689 | |
| WW | PLTHT.V16 | DTP4-L13 | 190.40 | 193.60 | −3.20 | 0.02670512 | ** |
| WW | PLTHT.V16 | DTP4-L16 | 187.88 | 192.08 | −4.20 | 0.00336881 | ** |
| WW | PLTHT.V16 | DTP4-L17 | 179.91 | 188.77 | −8.86 | 0.00000001 | ** |
| WW | PLTHT.V16 | Construct | 186.06 | 191.48 | −5.42 | 0.00000000 | ** |
| WW | DUALEX.CHL | DTP4-L13 | 45.09 | 44.69 | 0.40 | 0.78788150 | |
| WW | DUALEX.CHL | DTP4-L16 | 43.87 | 44.62 | −0.75 | 0.62014378 | |
| WW | DUALEX.CHL | DTP4-L17 | 43.18 | 44.79 | −1.63 | 0.27233009 | |
| WW | DUALEX.CHL | Construct | 44.04 | 44.70 | −0.66 | 0.44885445 | |
| WW | DUALEX.FLV | DTP4-L13 | 0.83 | 0.88 | −0.06 | 0.34590013 | |
| WW | DUALEX.FLV | DTP4-L16 | 0.84 | 0.88 | −0.03 | 0.58952091 | |
| WW | DUALEX.FLV | DTP4-L17 | 0.80 | 0.89 | −0.09 | 0.11031364 | |
| WW | DUALEX.FLV | Construct | 0.82 | 0.88 | −0.06 | 0.08113570 | * |
| WW | DUALEX.NBI | DTP4-L13 | 59.53 | 54.80 | 4.73 | 0.23817731 | |
| WW | DUALEX.NBI | DTP4-L16 | 55.40 | 53.47 | 1.93 | 0.62848327 | |
| WW | DUALEX.NBI | DTP4-L17 | 57.27 | 53.35 | 3.92 | 0.33121059 | |
| WW | DUALEX.NBI | Construct | 57.40 | 53.87 | 3.53 | 0.13539637 | |
| WW | WU | DTP4-L13 | 1168.57 | 1104.31 | 64.26 | 0.06497045 | * |
| WW | WU | DTP4-L16 | 1127.24 | 1009.67 | 117.57 | 0.00144349 | ** |
| WW | WU | DTP4-L17 | 1015.46 | 1112.83 | −97.36 | 0.00628317 | ** |
| WW | WU | Construct | 1103.76 | 1075.60 | 28.16 | 0.17655244 | |
| WW | WUE | DTP4-L13 | 0.13 | 0.14 | −0.01 | 0.04438817 | ** |
| WW | WUE | DTP4-L16 | 0.13 | 0.14 | −0.01 | 0.00774256 | ** |
| WW | WUE | DTP4-L17 | 0.13 | 0.13 | −0.01 | 0.13121996 | |
| WW | WUE | Construct | 0.13 | 0.14 | −0.01 | 0.00079553 | ** |
| WW | PLTHT.R1 | DTP4-L13 | 261.68 | 259.12 | 2.56 | 0.24461804 | |
| WW | PLTHT.R1 | DTP4-L16 | 256.35 | 252.12 | 4.22 | 0.03844392 | ** |
| WW | PLTHT.R1 | DTP4-L17 | 246.04 | 260.39 | −14.35 | 0.00000000 | ** |
| WW | PLTHT.R1 | Construct | 254.69 | 257.21 | −2.52 | 0.01432462 | ** |
| WW | EARHT | DTP4-L13 | 104.02 | 108.16 | −4.14 | 0.18688931 | |
| WW | EARHT | DTP4-L16 | 113.19 | 109.85 | 3.34 | 0.26579653 | |
| WW | EARHT | DTP4-L17 | 108.27 | 109.87 | −1.60 | 0.58734218 | |
| WW | EARHT | Construct | 108.50 | 109.30 | −0.80 | 0.63293108 | |
| WW | LFN | DTP4-L13 | 18.90 | 18.87 | 0.03 | 0.80990694 | |
| WW | LFN | DTP4-L16 | 18.93 | 18.87 | 0.06 | 0.60450049 | |
| WW | LFN | DTP4-L17 | 18.86 | 18.73 | 0.13 | 0.30082730 | |
| WW | LFN | Construct | 18.90 | 18.82 | 0.07 | 0.30080168 | |
| WW | EARLP | DTP4-L13 | 11.01 | 11.34 | −0.33 | 0.02957145 | ** |
| WW | EARLP | DTP4-L16 | 11.14 | 11.27 | −0.13 | 0.37839219 | |
| WW | EARLP | DTP4-L17 | 11.51 | 11.47 | 0.03 | 0.82043803 | |
| WW | EARLP | Construct | 11.22 | 11.36 | −0.14 | 0.10366448 | |
| WW | DWMAIN.R1 | DTP4-L13 | 141.28 | 154.43 | −13.14 | 0.00329335 | ** |
| WW | DWMAIN.R1 | DTP4-L16 | 135.89 | 141.91 | −6.02 | 0.14381188 | |
| WW | DWMAIN.R1 | DTP4-L17 | 126.35 | 145.84 | −19.49 | 0.00000722 | ** |
| WW | DWMAIN.R1 | Construct | 134.51 | 147.39 | −12.89 | 0.00000011 | ** |
| WW | DWTIL.R1 | DTP4-L13 | 10.70 | 6.90 | 3.80 | 0.01819417 | ** |
| WW | DWTIL.R1 | DTP4-L16 | 11.45 | 5.30 | 6.14 | 0.00035140 | * |
| WW | DWTIL.R1 | DTP4-L17 | 10.53 | 8.63 | 1.91 | 0.29347209 | |
| WW | DWTIL.R1 | Construct | 10.89 | 6.94 | 3.95 | 0.00000977 | ** |
| WW | DWVEG.R1 | DTP4-L13 | 154.58 | 159.77 | −5.19 | 0.32753594 | |
| WW | DWVEG.R1 | DTP4-L16 | 149.77 | 145.31 | 4.47 | 0.39342235 | |
| WW | DWVEG.R1 | DTP4-L17 | 137.68 | 154.33 | −16.65 | 0.00206288 | ** |
| WW | DWVEG.R1 | Construct | 147.34 | 153.14 | −5.79 | 0.06184574 | * |
| WW | DWEAR.R1 | DTP4-L13 | 2.40 | 2.27 | 0.13 | 0.46947926 | |
| WW | DWEAR.R1 | DTP4-L16 | 2.23 | 2.01 | 0.23 | 0.19670390 | |
| WW | DWEAR.R1 | DTP4-L17 | 1.27 | 2.18 | −0.92 | 0.00000063 | ** |
| WW | DWEAR.R1 | Construct | 1.97 | 2.15 | −0.18 | 0.07229087 | * |
| WW | DWTOT.R1 | DTP4-L13 | 158.68 | 162.14 | −5.46 | 0.30802330 | |
| WW | DWTOT.R1 | DTP4-L16 | 151.81 | 147.25 | 4.56 | 0.38844940 | |
| WW | DWTOT.R1 | DTP4-L17 | 139.30 | 156.50 | −17.20 | 0.00164783 | ** |
| WW | DWTOT.R1 | Construct | 149.28 | 155.30 | −6.03 | 0.05436711 | ** |
| WW | SHED | DTP4-L13 | 61.47 | 61.44 | 0.03 | 0.83820281 | |
| WW | SHED | DTP4-L16 | 81.59 | 61.46 | 0.14 | 0.36890286 | |
| WW | SHED | DTP4-L17 | 61.99 | 61.45 | 0.54 | 0.00066393 | ** |
| WW | SHED | Construct | 61.69 | 61.45 | 0.24 | 0.00828503 | ** |
| WW | SILK | DTP4-L13 | 62.48 | 62.42 | 0.06 | 0.74458746 | |
| WW | SILK | DTP4-L16 | 62.73 | 62.48 | 0.26 | 0.12897308 | |
| WW | SILK | DTP4-L17 | 62.90 | 62.50 | 0.40 | 0.02421494 | ** |
| WW | SILK | Construct | 62.70 | 62.47 | 0.24 | 0.01767604 | ** |
| WW | ASI | DTP4-L13 | 1.00 | 0.97 | 0.03 | 0.88029003 | |
| WW | ASI | DTP4-L16 | 1.13 | 1.00 | 0.13 | 0.52025914 | |
| WW | ASI | DTP4-L17 | 0.89 | 1.04 | −0.15 | 0.48299805 | |
| WW | ASI | Construct | 1.01 | 1.00 | 0.00 | 0.96659995 | |
| WW | GR.V6V10 | DTP4-L13 | 5.12 | 5.29 | −0.16 | 0.02138426 | ** |
| WW | GR.V6V10 | DTP4-L16 | 5.05 | 5.30 | −0.25 | 0.00051092 | ** |
| WW | GR.V6V10 | DTP4-L17 | 4.72 | 5.16 | −0.44 | 0.00000000 | ** |
| WW | GR.V6V10 | Construct | 4.96 | 5.25 | −0.28 | 0.00000000 | ** |
| WW | GR.V10V13 | DTP4-L13 | 6.05 | 6.06 | 0.00 | 0.97370623 | |
| WW | GR.V10V13 | DTP4-L16 | 6.05 | 5.99 | 0.05 | 0.57289713 | |
| WW | GR.V10V13 | DTP4-L17 | 5.90 | 5.99 | −0.09 | 0.34364716 | |
| WW | GR.V10V13 | Construct | 6.00 | 6.01 | −0.01 | 0.80674055 | |
| WW | STKD | DTP4-L13 | 19.66 | 19.57 | 0.09 | 0.81915673 | |
| WW | STKD | DTP4-L16 | 19.41 | 19.14 | 0.26 | 0.50007008 | |
| WW | STKD | DTP4-L17 | 18.47 | 19.44 | −0.97 | 0.01514156 | ** |
| WW | STKD | Construct | 19.18 | 19.38 | −0.21 | 0.36986927 | |
| WW | DWVEG.R6 | DTP4-L13 | 185.19 | 177.14 | 8.05 | 0.472471015 | |
| WW | DWVEG.R6 | DTP4-L16 | 186.95 | 160.32 | 26.63 | 0.020291776 | ** |
| WW | DWVEG.R6 | DTP4-L17 | 179.65 | 173.34 | 6.30 | 0.559822469 | |
| WW | DWVEG.R6 | Construct | 183.93 | 170.27 | 13.66 | 0.035936981 | ** |
| WW | ROW | DTP4-L13 | 15.59 | 15.91 | −0.32 | 0.479182267 | |
| WW | ROW | DTP4-L16 | 15.46 | 15.23 | 0.23 | 0.617709691 | |
| WW | ROW | DTP4-L17 | 15.67 | 15.46 | 0.21 | 0.637947442 | |
| WW | ROW | Construct | 15.57 | 15.53 | 0.04 | 0.874855288 | |
| WW | DWK | DTP4-L13 | 191.37 | 198.81 | −7.44 | 0.438648208 | |
| WW | DWK | DTP4-L16 | 185.09 | 182.01 | 3.08 | 0.752787745 | |
| WW | DWK | DTP4-L17 | 201.76 | 190.13 | 11.63 | 0.234351744 | |
| WW | DWK | Construct | 192.74 | 190.32 | 2.42 | 0.666015774 | |
| WW | DWCOB | DTP4-L13 | 29.01 | 30.61 | −1.60 | 0.30686635 | |
| WW | DWCOB | DTP4-L16 | 28.21 | 27.05 | 1.16 | 0.46548495 | |
| WW | DWCOB | DTP4-L17 | 29.98 | 29.34 | 0.64 | 0.688236714 | |
| WW | DWCOB | Construct | 29.07 | 29.00 | 0.07 | 0.940788565 | |
| WW | DWEAR | DTP4-L13 | 220.38 | 229.44 | −9.06 | 0.408924123 | |
| WW | DWEAR | DTP4-L16 | 213.27 | 209.02 | 4.25 | 0.703637408 | |
| WW | DWEAR | DTP4-L17 | 231.74 | 219.47 | 12.28 | 0.271297248 | |
| WW | DWEAR | Construct | 221.80 | 219.31 | 2.49 | 0.697630835 | |
| WW | KN | DTP4-L13 | 622.83 | 672.22 | −49.39 | 0.094181834 | |
| WW | KN | DTP4-L16 | 596.25 | 605.66 | −9.41 | 0.75222573 | |
| WW | KN | DTP4-L17 | 650.05 | 614.89 | 35.16 | 0.238313504 | |
| WW | KN | Construct | 623.04 | 630.92 | −7.88 | 0.645325941 | |
| WW | X100KW | DTP4-L13 | 30.64 | 29.59 | 1.05 | 0.253513862 | |
| WW | X100KW | DTP4-L16 | 31.21 | 30.16 | 1.05 | 0.262791041 | |
| WW | X100KW | DTP4-L17 | 31.00 | 30.80 | 0.20 | 0.833547395 | |
| WW | X100KW | Construct | 30.95 | 30.18 | 0.77 | 0.15555604 | |
| WW | DWTOT | DTP4-L13 | 411.37 | 413.61 | −2.24 | 0.916063317 | |
| WW | DWTOT | DTP4-L16 | 404.92 | 374.02 | 30.90 | 0.15154254 | |
| WW | DWTOT | DTP4-L17 | 420.11 | 393.88 | 26.23 | 0.203301266 | |
| WW | DWTOT | Construct | 412.14 | 393.84 | 18.30 | 0.136197041 | |
| WW | HI | DTP4-L13 | 0.48 | 0.49 | −0.02 | 0.257690608 | |
| WW | HI | DTP4-L16 | 0.47 | 0.50 | −0.03 | 0.035508997 | ** |
| WW | HI | DTP4-L17 | 0.50 | 0.48 | 0.02 | 0.200998462 | |
| WW | HI | Construct | 0.48 | 0.49 | −0.01 | 0.236486772 | |
| DRT | TILN.V4 | DTP4-L13 | 1.18 | 0.81 | 0.37 | 0.03737189 | ** |
| DRT | TILN.V4 | DTP4-L16 | 1.34 | 0.61 | 0.73 | 0.00004332 | ** |
| DRT | TILN.V4 | DTP4-L17 | 1.28 | 0.74 | 0.53 | 0.00263586 | ** |
| DRT | TILN.V4 | Construct | 1.27 | 0.72 | 0.54 | 0.00000022 | ** |
| DRT | PLTHT.V6 | DTP4-L13 | 22.11 | 22.20 | −0.09 | 0.71441900 | |
| DRT | PLTHT.V6 | DTP4-L16 | 21.77 | 21.84 | −0.07 | 0.78976699 | |
| DRT | PLTHT.V6 | DTP4-L17 | 21.57 | 22.18 | −0.61 | 0.01802070 | ** |
| DRT | PLTHT.V6 | Construct | 21.81 | 22.07 | −0.26 | 0.08476641 | ** |
| DRT | LFN.V6 | DTP4-L13 | 5.98 | 5.95 | 0.03 | 0.45412771 | |
| DRT | LFN.V6 | DTP4-L16 | 5.95 | 5.95 | 0.00 | 1.00000000 | |
| DRT | LFN.V6 | DTP4-L17 | 5.88 | 5.98 | −0.10 | 0.02565660 | ** |
| DRT | LFN.V6 | Construct | 5.94 | 5.96 | −0.02 | 0.38752173 | |
| DRT | TILN.V6 | DTP4-L13 | 2.60 | 2.17 | 0.43 | 0.00206163 | ** |
| DRT | TILN.V6 | DTP4-L16 | 2.77 | 2.10 | 0.67 | 0.00000321 | ** |
| DRT | TILN.V6 | DTP4-L17 | 2.80 | 2.37 | 0.43 | 0.00206163 | ** |
| DRT | TILN.V6 | Construct | 2.72 | 2.21 | 0.51 | 0.00000000 | ** |
| DRT | PLTHT.V10 | DTP4-L13 | 92.20 | 93.42 | −1.21 | 0.25004790 | |
| DRT | PLTHT.V10 | DTP4-L16 | 91.37 | 92.32 | −0.95 | 0.37703904 | |
| DRT | PLTHT.V10 | DTP4-L17 | 88.49 | 92.79 | −4.30 | 0.00007419 | ** |
| DRT | PLTHT.V10 | Construct | 90.69 | 92.84 | −2.15 | 0.00066349 | ** |
| DRT | LFN.V10 | DTP4-L13 | 10.00 | 10.07 | −0.07 | 0.30588796 | |
| DRT | LFN.V10 | DTP4-L16 | 10.07 | 10.03 | 0.03 | 0.60828418 | |
| DRT | LFN.V10 | DTP4-L17 | 9.93 | 10.10 | −0.17 | 0.01109122 | ** |
| DRT | LFN.V10 | Construct | 10.00 | 10.07 | −0.07 | 0.07704135 | |
| DRT | PLTHT.V13 | DTP4-L13 | 135.66 | 138.16 | −2.50 | 0.05873323 | * |
| DRT | PLTHT.V13 | DTP4-L16 | 135.10 | 134.55 | 0.56 | 0.67020840 | |
| DRT | PLTHT.V13 | DTP4-L17 | 134.27 | 137.87 | −3.60 | 0.00667808 | ** |
| DRT | PLTHT.V13 | Construct | 135.01 | 136.86 | −1.85 | 0.01485240 | ** |
| DRT | LFN.V13 | DTP4-L13 | 12.90 | 12.97 | −0.07 | 0.39420034 | |
| DRT | LFN.V13 | DTP4-L16 | 12.87 | 12.80 | 0.07 | 0.39420034 | |
| DRT | LFN.V13 | DTP4-L17 | 12.80 | 12.97 | −0.17 | 0.03413080 | ** |
| DRT | LFN.V13 | Construct | 12.86 | 12.91 | −0.06 | 0.21929525 | |
| DRT | PLTHT.V16 | DTP4-L13 | 173.44 | 174.19 | −0.75 | 0.60570222 | |
| DRT | PLTHT.V16 | DTP4-L16 | 172.78 | 172.69 | 0.07 | 0.96121412 | |
| DRT | PLTHT.V16 | DTP4-L17 | 172.46 | 174.43 | −1.97 | 0.16863300 | |
| DRT | PLTHT.V16 | Construct | 172.89 | 173.77 | −0.88 | 0.28458043 | |
| DRT | DUALEX.CHL | DTP4-L13 | 41.39 | 42.09 | −0.70 | 0.55913823 | |
| DRT | DUALEX.CHL | DTP4-L16 | 41.68 | 41.04 | 0.65 | 0.58371725 | |
| DRT | DUALEX.CHL | DTP4-L17 | 41.81 | 41.80 | 0.01 | 0.99403591 | |
| DRT | DUALEX.CHL | Construct | 41.63 | 41.64 | −0.01 | 0.98483459 | |
| DRT | DUALEX.FLV | DTP4-L13 | 0.73 | 0.81 | −0.08 | 0.10497460 | |
| DRT | DUALEX.FLV | DTP4-L16 | 0.72 | 0.86 | −0.14 | 0.00384718 | ** |
| DRT | DUALEX.FLV | DTP4-L17 | 0.78 | 0.72 | 0.06 | 0.21800652 | |
| DRT | DUALEX.FLV | Construct | 0.74 | 0.80 | −0.05 | 0.05661318 | * |
| DRT | DUALEX.NBI | DTP4-L13 | 59.84 | 54.78 | 5.07 | 0.15566030 | |
| DRT | DUALEX.NBI | DTP4-L16 | 62.23 | 53.77 | 8.47 | 0.01832608 | ** |
| DRT | DUALEX.NBI | DTP4-L17 | 57.05 | 63.58 | −6.54 | 0.07037471 | * |
| DRT | DUALEX.NBI | Construct | 59.71 | 57.38 | 2.33 | 0.25803990 | |
| DRT | RWC | DTP4-L13 | 63.07 | 60.05 | 3.02 | 0.00001012 | ** |
| DRT | RWC | DTP4-L16 | 63.26 | 60.92 | 2.34 | 0.00167083 | ** |
| DRT | RWC | DTP4-L17 | 60.35 | 63.71 | −3.37 | 0.00005237 | ** |
| DRT | RWC | Construct | 62.22 | 61.56 | 0.66 | 0.11241576 | |
| DRT | PLTHT.R1 | DTP4-L13 | 240.17 | 238.29 | 1.88 | 0.26645568 | |
| DRT | PLTHT.R1 | DTP4-L16 | 238.63 | 237.80 | −1.18 | 0.46424610 | |
| DRT | PLTHT.R1 | DTP4-L17 | 236.32 | 241.45 | −5.13 | 0.00738054 | ** |
| DRT | PLTHT.R1 | Construct | 237.70 | 239.18 | −1.48 | 0.24612187 | |
| DRT | EARHT | DTP4-L13 | 108.91 | 108.11 | 0.79 | 0.82357635 | |
| DRT | EARHT | DTP4-L16 | 112.05 | 115.87 | −3.82 | 0.25470767 | |
| DRT | EARHT | DTP4-L17 | 110.96 | 111.45 | −0.49 | 0.89285465 | |
| DRT | EARHT | Construct | 110.64 | 111.81 | −1.17 | 0.56248804 | |
| DRT | LFN | DTP4-L13 | 18.77 | 18.90 | −0.13 | 0.36030764 | |
| DRT | LFN | DTP4-L16 | 18.77 | 18.97 | −0.20 | 0.15503518 | |
| DRT | LFN | DTP4-L17 | 18.77 | 18.87 | −0.10 | 0.47612562 | |
| DRT | LFN | Construct | 18.77 | 18.91 | −0.14 | 0.07918268 | * |
| DRT | EARLP | DTP4-L13 | 11.44 | 11.66 | −0.21 | 0.25184046 | |
| DRT | EARLP | DTP4-L16 | 11.30 | 11.62 | −0.31 | 0.08839970 | * |
| DRT | EARLP | DTP4-L17 | 11.45 | 11.49 | −0.04 | 0.83236924 | |
| DRT | EARLP | Construct | 11.40 | 11.59 | −0.19 | 0.07795055 | * |
| DRT | DWMAIN.R1 | DTP4-L13 | 128.67 | 135.77 | −7.11 | 0.00067236 | ** |
| DRT | DWMAIN.R1 | DTP4-L16 | 127.87 | 130.60 | −2.73 | 0.22100772 | |
| DRT | DWMAIN.R1 | DTP4-L17 | 124.70 | 128.09 | −3.38 | 0.17081765 | |
| DRT | DWMAIN.R1 | Construct | 127.08 | 131.49 | −4.41 | 0.00111012 | ** |
| DRT | DWTIL.R1 | DTP4-L13 | 6.43 | 3.90 | 2.53 | 0.09173020 | ** |
| DRT | DWTIL.R1 | DTP4-L16 | 6.31 | 3.04 | 3.27 | 0.02219856 | ** |
| DRT | DWTIL.R1 | DTP4-L17 | 9.25 | 2.41 | 6.84 | 0.00001569 | ** |
| DRT | DWTIL.R1 | Construct | 7.33 | 3.12 | 4.21 | 0.00000292 | ** |
| DRT | DWVEG.R1 | DTP4-L13 | 135.77 | 138.70 | −2.92 | 0.44895425 | |
| DRT | DWVEG.R1 | DTP4-L16 | 135.94 | 131.22 | 4.72 | 0.22226946 | |
| DRT | DWVEG.R1 | DTP4-L17 | 133.02 | 130.33 | 2.68 | 0.50819162 | |
| DRT | DWVEG.R1 | Construct | 134.91 | 133.42 | 1.49 | 0.52385836 | |
| DRT | DWEAR.R1 | DTP4-L13 | 1.28 | 1.30 | −0.02 | 0.94930818 | |
| DRT | DWEAR.R1 | DTP4-L16 | 1.44 | 1.02 | 0.42 | 0.14805885 | |
| DRT | DWEAR.R1 | DTP4-L17 | 1.70 | 0.92 | 0.78 | 0.01358393 | ** |
| DRT | DWEAR.R1 | Construct | 1.48 | 1.08 | 0.40 | 0.03074121 | ** |
| DRT | DWTOT.R1 | DTP4-L13 | 136.64 | 139.84 | −3.19 | 0.41581367 | |
| DRT | DWTOT.R1 | DTP4-L16 | 137.62 | 132.58 | 5.04 | 0.20337115 | |
| DRT | DWTOT.R1 | DTP4-L17 | 134.83 | 131.47 | 3.35 | 0.41814064 | |
| DRT | DWTOT.R1 | Construct | 136.36 | 134.63 | 1.73 | 0.46821874 | |
| DRT | SHED | DTP4-L13 | 61.80 | 61.97 | −0.17 | 0.57903541 | |
| DRT | SHED | DTP4-L16 | 61.97 | 82.43 | −0.47 | 0.12144252 | |
| DRT | SHED | DTP4-L17 | 62.63 | 61.83 | 0.80 | 0.00835084 | ** |
| DRT | SHED | Construct | 62.13 | 62.08 | 0.06 | 0.74866113 | |
| DRT | SILK | DTP4-L13 | 65.11 | 65.66 | −0.55 | 0.23958634 | |
| DRT | SILK | DTP4-L16 | 65.20 | 65.29 | −0.10 | 0.83421664 | |
| DRT | SILK | DTP4-L17 | 64.98 | 66.26 | −1.28 | 0.01041071 | ** |
| DRT | SILK | Construct | 65.09 | 65.73 | −0.64 | 0.01991307 | ** |
| DRT | ASI | DTP4-L13 | 3.38 | 3.88 | −0.50 | 0.34118899 | |
| DRT | ASI | DTP4-L16 | 3.51 | 2.89 | 0.62 | 0.22779519 | |
| DRT | ASI | DTP4-L17 | 2.48 | 4.64 | −2.17 | 0.00014762 | ** |
| DRT | ASI | Construct | 3.12 | 3.80 | −0.68 | 0.02729734 | ** |
| DRT | GR.V6V10 | DTP4-L13 | 5.39 | 5.50 | −0.11 | 0.13336177 | |
| DRT | GR.V6V10 | DTP4-L16 | 5.34 | 5.40 | −0.06 | 0.41283559 | |
| DRT | GR.V6V10 | DTP4-L17 | 5.14 | 5.42 | −0.28 | 0.00013367 | ** |
| DRT | GR.V6V10 | Construct | 5.29 | 5.44 | −0.15 | 0.00056568 | ** |
| DRT | GR.V10V13 | DTP4-L13 | 5.35 | 5.55 | −0.19 | 0.14897867 | |
| DRT | GR.V10V13 | DTP4-L16 | 5.43 | 5.27 | 0.15 | 0.26051959 | |
| DRT | GR.V10V13 | DTP4-L17 | 5.59 | 5.44 | 0.15 | 0.25486733 | |
| DRT | GR.V10V13 | Construct | 5.46 | 5.42 | 0.04 | 0.62904773 | |
| DRT | YL.7.15 | DTP4-L13 | 6.98 | 7.11 | −0.13 | 0.19340561 | |
| DRT | YL.7.15 | DTP4-L16 | 6.74 | 6.94 | −0.20 | 0.04179433 | ** |
| DRT | YL.7.15 | DTP4-L17 | 6.75 | 6.98 | −0.23 | 0.01922373 | ** |
| DRT | YL.7.15 | Construct | 6.82 | 7.01 | −0.19 | 0.00123685 | ** |
| DRT | YL.8.1 | DTP4-L13 | 9.88 | 10.41 | −0.53 | 0.05275571 | * |
| DRT | YL.8.1 | DTP4-L16 | 9.96 | 9.98 | −0.02 | 0.94170108 | |
| DRT | YL.8.1 | DTP4-L17 | 9.70 | 9.97 | −0.27 | 0.33026794 | |
| DRT | YL.8.1 | Construct | 9.85 | 10.12 | −0.27 | 0.09054654 | * |
| DRT | YL.8.11 | DTP4-L13 | 10.99 | 11.76 | −0.77 | 0.00606165 | ** |
| DRT | YL.8.11 | DTP4-L16 | 10.84 | 10.87 | −0.04 | 0.89082227 | |
| DRT | YL.8.11 | DTP4-L17 | 10.44 | 10.95 | −0.51 | 0.07267146 | * |
| DRT | YL.8.11 | Construct | 10.75 | 11.19 | −0.44 | 0.00749806 | ** |
| DRT | DWVEG.R6 | DTP4-L13 | 114.68 | 118.93 | −4.26 | 0.610440457 | |
| DRT | DWVEG.R6 | DTP4-L16 | 119.38 | 120.98 | −1.60 | 0.848086748 | |
| DRT | DWVEG.R6 | DTP4-L17 | 120.64 | 146.04 | −25.40 | 0.005617906 | ** |
| DRT | DWVEG.R6 | Construct | 118.23 | 128.65 | −10.42 | 0.037370754 | ** |
| DRT | ROW.1 | DTP4-L13 | 15.56 | 15.07 | 0.49 | 0.392964042 | |
| DRT | ROW.1 | DTP4-L16 | 15.33 | 16.12 | −0.78 | 0.158014994 | |
| DRT | ROW.1 | DTP4-L17 | 15.12 | 15.00 | 0.12 | 0.843163311 | |
| DRT | ROW.1 | Construct | 15.34 | 15.40 | −0.06 | 0.858801963 | |
| DRT | DWK | DTP4-L13 | 95.65 | 79.98 | 15.67 | 0.151305864 | |
| DRT | DWK | DTP4-L16 | 93.74 | 84.95 | 8.78 | 0.393267032 | |
| DRT | DWK | DTP4-L17 | 84.86 | 62.85 | 22.00 | 0.049180594 | ** |
| DRT | DWK | Construct | 91.42 | 75.93 | 15.49 | 0.013697301 | ** |
| DRT | DWCOB | DTP4-L13 | 15.50 | 14.52 | 0.98 | 0.406520641 | |
| DRT | DWCOB | DTP4-L16 | 15.83 | 15.23 | 0.61 | 0.585311369 | |
| DRT | DWCOB | DTP4-L17 | 15.67 | 15.00 | 0.66 | 0.580121718 | |
| DRT | DWCOB | Construct | 15.67 | 14.92 | 0.75 | 0.265159919 | |
| DRT | DWEAR | DTP4-L13 | 110.98 | 94.32 | 16.66 | 0.149473434 | |
| DRT | DWEAR | DTP4-L16 | 109.53 | 100.18 | 9.36 | 0.390106055 | |
| DRT | DWEAR | DTP4-L17 | 100.57 | 77.88 | 22.69 | 0.055285154 | |
| DRT | DWEAR | Construct | 107.03 | 90.79 | 16.24 | 0.014608231 | ** |
| DRT | KN | DTP4-L13 | 373.56 | 282.57 | 90.99 | 0.042767336 | ** |
| DRT | KN | DTP4-L16 | 341.47 | 324.97 | 16.50 | 0.696092766 | |
| DRT | KN | DTP4-L17 | 315.12 | 228.80 | 86.32 | 0.058673186 | |
| DRT | KN | Construct | 343.38 | 278.78 | 64.60 | 0.012066189 | ** |
| DRT | X100KW | DTP4-L13 | 26.08 | 27.58 | −1.50 | 0.156126321 | |
| DRT | X100KW | DTP4-L16 | 28.07 | 26.87 | 1.19 | 0.228474518 | |
| DRT | X100KW | DTP4-L17 | 27.11 | 26.80 | 0.32 | 0.768899771 | |
| DRT | X100KW | Construct | 27.09 | 27.08 | 0.00 | 0.994088329 | |
| DRT | DWTOT | DTP4-L13 | 218.34 | 204.63 | 13.70 | 0.25823758 | |
| DRT | DWTOT | DTP4-L16 | 219.85 | 216.85 | 3.00 | 0.803698091 | |
| DRT | DWTOT | DTP4-L17 | 212.97 | 209.09 | 3.88 | 0.767715805 | |
| DRT | DWTOT | Construct | 217.05 | 210.19 | 6.86 | 0.339825972 | |
| DRT | HI | DTP4-L13 | 0.39 | 0.31 | 0.08 | 0.147886079 | |
| DRT | HI | DTP4-L16 | 0.36 | 0.37 | 0.00 | 0.937885549 | |
| DRT | HI | DTP4-L17 | 0.34 | 0.21 | 0.13 | 0.025392684 | ** |
| DRT | HI | Construct | 0.36 | 0.30 | 0.07 | 0.033449426 | ** |

(WW = well watered; DRT = drought stressed; ** p value < 0.05; * p value < 0.1))

### Example 39

### Profile HMM Specific to DTP4

[0707] Profile HMMs are statistical models of multiple sequence alignments, or even of single sequences. They capture position-specific information about how conserved each column of the alignment is, and which residues are likely.

### Description:

[0708] HMMER® (biosequence analysis using profile hidden Markov models) is used to search sequence databases for homologs of protein sequences, and to make protein sequence alignments. HMMER® can be used to search sequence databases with single query sequences, but it becomes particularly powerful when the query is a multiple sequence alignment of a sequence family. HMMER® makes a profile of the query that assigns a position-specific scoring system for substitutions, insertions, and deletions. HMMER® profiles are probabilistic models called “profile hidden Markov models” (profile HMMs) (Krogh et al., 1994, J. Mol. Biol., 235:1501-1531; Eddy, 1998, Curr. Opin. Struct. Biol., 6:361-365.; Durbin et al., Probabilistic Models of Proteins and Nucleic Acids. Cambridge University Press, Cambridge UK. 1998, Eddy, Sean R., March 2010, HMMER User's Guide Version 3.0, Howard Hughes Medical Institute, Janelia Farm Research Campus, Ashburn Va., USA; US patent publication No. US20100293118). Compared to BLAST, FASTA, and other sequence alignment and database search tools based on older scoring methodology, HMMER® aims to be significantly more accurate and more able to detect remote homologs, because of the strength of its underlying probability models.

### Method for Creating Profile HMMs Specific to DTP4 Gene Family

### Step1: Identification of Homologs of AT-DTP4:

[0709] Homologs for AT-CXE20 were identified by querying protein sequence of AT-DTP4 using BLAST and Jackhammer within an in house database of protein sequences generated by compilation of protein sequences from UniProt and translated ORFs from various plant genomes that were retrieved from NCBI and internal sequencing cDNA sequencing data. Homologs thus identified were aligned using the software MUSCLE (Edgar, Robert C. (2004), Nucleic Acids Research 19; 32(5):1792-7) using the MEGA6 program (Phylogenetic and molecular evolutionary analyses were conducted using MEGA version 6 (Tamura K., et al (2013) Mol. Biol. Evol. 30 (12): 2725-2729). Phylogenetic analysis was done with the MEGA6 program, and the Maximum Likelihood method (Jones D. T., et al (1992). Comp Appl Biosci 8: 275-282; Tamura K., et al (2013) Mol. Biol. Evol. 30 (12): 2725-2729).

[0710] Branches of the resulting tree were annotated according to Marshall et al J Mol Evol (2003) 57:487-500. Utilizing the Marshall nomenclature, a subset of genes from CXE tree, Type II, Type IV, Type V, and Type VI were isolated and realigned. A new Maximum Likelihood tree was built using just these proteins.

### Step 2: Identify and Realign Type II Carboxylesterases

[0711] Proteins specific to the Type II lead branch were realigned and a new tree was built with the same process as step 1. Proteins from the new Type II specific tree were then picked based on the branching pattern in order to get one protein per sub branch. These proteins, SEQ ID NOS:18, 29, 33, 45, 47, 53, 55, 61,64, 65, 77, 78, 101, 103, 105, 107, 111, 115, 131, 132, 135, 137, 139, 141, 144, 433, 559 and 604, were realigned and used for the HMM build in step 3.

Step 3: Creating profile HMM for DTP4

[0712] HMMbuild module of HMMER® 3.0 was used to create a profile HMM for DTP4 based on Multiple Sequence Alignment (MSA) of homologs of AT-CXE20.

### Step 4: Using Profile to Search Protein Database

[0713] Profile HMM created was queried in a database of protein sequences described in Step 1. Hits retrieved were further examined as described in Step 5.

### Step5: Determining Specificity of Profile to Identify DTP4 Related Protein Sequences

[0714] All protein sequences that matched the profile HMM of CXE20 with an E-value of less than 0.001 over at least 80% length of the HMM profile were regarded as statistically significant and corresponding to gene family. Since all statistically significant protein hits obtained are members of CXE20 gene family, it is suggested that profile HMM for CXE20 described here is specific to prioritize ranking of the Type II carboxylesterases, and identify other members of the carboxylesterase family. The HMM profile for CXE20 family is shown in the appended Table 18.

### Example 40

### Targeted Regulation or Mutagenesis of an Endogenous DTP4 Gene

[0715] The skilled artisan will further appreciate that changes can be introduced by mutation of the nucleic acid sequences, thereby leading to changes in either the expression of encoded mRNAs or the amino acid sequence of the encoded polypeptide e.g., DTP4, resulting in alteration of the biological activity of the mRNA or protein, respectively, or both. See for example methods described in U.S. patent application Ser. No. 14/463,687 filed on Aug. 20, 2014, incorporated by reference in its entirety herein. Thus, variant nucleic acid molecules can be created by introducing one or more nucleotide substitutions, additions and/or deletions into the corresponding nucleic acid sequence or surrounding sequences disclosed herein. Such variant nucleic acid sequences are also encompassed by the present disclosure.

[0716] Variant nucleic acid sequences can be made by introducing sequence changes randomly along all or part of the genic region, including, but not limited to, chemical or irradiation mutagenesis and oligonucleotide-mediated mutagenesis (OMM) (Beetham et al. 1999; Okuzaki and Toriyama 2004). Alternatively or additionally, sequence changes can be introduced at specific selected sites using double-strand-break technologies such as ZNFs, custom designed homing endonucleases, TALENs, CRISPR/CAS (also referred to as guide RNA/Cas endonuclease systems (U.S. patent application Ser. No. 14/463,687 filed on Aug. 20, 2014), or other protein and/or nucleic acid based mutagenesis technologies. The resultant variants can be screened for altered activity. It will be appreciated that the techniques are often not mutually exclusive. Indeed, the various methods can be used singly or in combination, in parallel or in series, to create or access diverse sequence variants.

TABLE 18
HMM profile

| | | | HMMER3/b [3.0 \| March 2010] | | | | | | | | |
|---|---|---|---|---|---|---|---|---|---|---|---|
| | | | NAME CXE20_TypeIIBranch_limit_one_perSubBranch | | | | | | | | |
| | | | LENG 326 | | | | | | | | |
| | | | ALPH amino | | | | | | | | |
| | | | RF no | | | | | | | | |
| | | | CS no | | | | | | | | |
| | | | MAP yes | | | | | | | | |
| | | | DATE Thu Nov 13 16:23:57 2014 | | | | | | | | |
| | | | NSEQ 28 | | | | | | | | |
| | | | EFFN 1.124512 | | | | | | | | |
| | | | CKSUM 701189305 | | | | | | | | |
| | | | STATS LOCAL MSV −11.1717 0.70062 | | | | | | | | |
| | | | STATS LOCAL VITERBI −12.0197 0.70062 | | | | | | | | |
| | | | STATS LOCAL FORWARD −5.8925 0.70062 | | | | | | | | |
| HMM | A | C | D | E | F | G | H | I | K | L | M |
| | m−>m | m−>i | m−>d | i−>m | i−>i | d−>m | d−>d | | | | |
| COMPO | 2.50926 | 4.25552 | 2.8369 | 2.71139 | 3.33164 | 2.91186 | 3.58549 | 2.84504 | 2.73821 | 2.42491 | 3.61156 |
| | 2.68593 | 4.42274 | 2.77541 | 2.73137 | 3.46258 | 2.40556 | 3.72518 | 3.29342 | 2.67758 | 2.69305 | 4.24363 |
| | 0.84551 | 1.24233 | 1.26602 | 2.01075 | 0.14374 | 0 | * | | | | |
| 1 | 2.51668 | 4.86384 | 2.87354 | 2.09458 | 4.13606 | 2.98579 | 3.57833 | 3.56272 | 2.2325 | 3.13434 | 3.60294 |
| | 2.68618 | 4.42225 | 2.77519 | 2.73123 | 3.46354 | 2.40513 | 3.72494 | 3.29354 | 2.67741 | 2.69355 | 4.2469 |
| | 0.0295 | 3.93385 | 4.65619 | 0.61958 | 0.77255 | 0.70739 | 0.67911 | | | | |
| 2 | 2.39992 | 4.84776 | 2.4917 | 2.27086 | 4.10996 | 3.22751 | 3.58926 | 3.53813 | 2.37511 | 3.00262 | 3.41645 |
| | 2.68618 | 4.42225 | 2.77519 | 2.73123 | 3.46354 | 2.40513 | 3.72494 | 3.29354 | 2.67741 | 2.69355 | 4.2469 |
| | 0.02778 | 3.99313 | 4.71547 | 0.61958 | 0.77255 | 0.67547 | 0.71114 | | | | |
| 3 | 2.49757 | 4.94613 | 2.67419 | 2.21463 | 4.23287 | 3.19058 | 3.57886 | 3.67816 | 2.16759 | 3.1002 | 3.53885 |
| | 2.68618 | 4.42225 | 2.77519 | 2.73123 | 3.46354 | 2.40513 | 3.72494 | 3.29354 | 2.67741 | 2.69355 | 4.2469 |
| | 0.02645 | 4.04144 | 4.76379 | 0.61958 | 0.77255 | 0.52031 | 0.90223 | | | | |
| 4 | 2.51011 | 4.75462 | 2.90058 | 2.39419 | 3.98528 | 3.15565 | 3.65758 | 3.39418 | 2.47537 | 3.01332 | 3.00755 |
| | 2.68618 | 4.42225 | 2.77519 | 2.73123 | 3.46354 | 2.40513 | 3.72494 | 3.29354 | 2.67741 | 2.69355 | 4.2469 |
| | 0.02353 | 4.15705 | 4.8794 | 0.61958 | 0.77255 | 0.60407 | 0.79094 | | | | |
| 5 | 2.49208 | 4.73514 | 3.04507 | 2.37102 | 3.95612 | 3.44744 | 3.50593 | 3.18094 | 2.41281 | 2.85253 | 3.81156 |
| | 2.68618 | 4.42225 | 2.77519 | 2.73123 | 3.46354 | 2.40513 | 3.72494 | 3.29354 | 2.67741 | 2.69355 | 4.2469 |
| | 0.02353 | 4.15705 | 4.8794 | 0.61958 | 0.77255 | 0.56577 | 0.83915 | | | | |
| 6 | 2.54242 | 4.91918 | 2.53966 | 2.21759 | 4.19078 | 3.41485 | 3.61804 | 3.62671 | 2.394 | 3.04389 | 3.75267 |
| | 2.68618 | 4.42225 | 2.77519 | 2.73123 | 3.46354 | 2.40513 | 3.72494 | 3.29354 | 2.67741 | 2.69355 | 4.2469 |
| | 0.02307 | 4.17665 | 4.899 | 0.61958 | 0.77255 | 0.5825 | 0.81758 | | | | |
| 7 | 2.54402 | 4.87337 | 2.78891 | 2.41637 | 4.13149 | 3.19872 | 3.45235 | 3.55859 | 2.26532 | 2.7798 | 3.71016 |
| | 2.68618 | 4.42225 | 2.77519 | 2.73123 | 3.46354 | 2.40513 | 3.72494 | 3.29354 | 2.67741 | 2.69355 | 4.2469 |
| | 0.02307 | 4.17665 | 4.899 | 0.61958 | 0.77255 | 0.53702 | 0.87824 | | | | |
| 8 | 2.37704 | 4.51025 | 3.25209 | 2.70389 | 3.76346 | 3.45872 | 3.78012 | 2.80156 | 2.67734 | 2.81709 | 3.43996 |
| | 2.68618 | 4.42225 | 2.77519 | 2.73123 | 3.46354 | 2.40513 | 3.72494 | 3.29354 | 2.67741 | 2.69355 | 4.2469 |
| | 0.03938 | 4.19951 | 3.74604 | 0.61958 | 0.77255 | 0.55617 | 0.85191 | | | | |
| 9 | 2.51441 | 3.9357 | 3.19229 | 2.63786 | 3.54278 | 3.46497 | 3.73718 | 3.17037 | 2.51696 | 2.74557 | 3.69024 |
| | 2.68618 | 4.42225 | 2.77519 | 2.73123 | 3.46354 | 2.40513 | 3.72494 | 3.29354 | 2.67741 | 2.69355 | 4.2469 |
| | 0.02292 | 4.18305 | 4.9054 | 0.61958 | 0.77255 | 0.57526 | 0.82681 | | | | |
| 10 | 2.45991 | 4.53639 | 3.21275 | 2.65303 | 3.71899 | 3.5 | 3.73377 | 2.55299 | 2.43896 | 2.77209 | 3.38373 |
| | 2.68618 | 4.42225 | 2.77519 | 2.73123 | 3.46354 | 2.40513 | 3.72494 | 3.29354 | 2.67741 | 2.69355 | 4.2469 |
| | 0.02292 | 4.18305 | 4.9054 | 0.61958 | 0.77255 | 0.46321 | 0.99226 | | | | |
| 11 | 2.36766 | 4.34189 | 3.22428 | 2.8129 | 3.14532 | 3.58698 | 3.84004 | 2.60558 | 2.86376 | 2.50783 | 2.86048 |
| | 2.6862 | 4.42232 | 2.77526 | 2.73107 | 3.4636 | 2.40519 | 3.72501 | 3.29341 | 2.6774 | 2.69361 | 4.24673 |
| | 0.16912 | 1.90651 | 4.96231 | 0.84355 | 0.56244 | 0.47318 | 0.97557 | | | | |
| 12 | 2.74238 | 4.13315 | 1.60717 | 2.15785 | 4.48655 | 3.39894 | 3.68695 | 3.9551 | 2.42318 | 3.47378 | 4.25285 |
| | 2.68618 | 4.42225 | 2.77519 | 2.73123 | 3.46354 | 2.40513 | 3.72494 | 3.29354 | 2.67741 | 2.69355 | 4.2469 |
| | 0.0213 | 4.25552 | 4.97786 | 0.61958 | 0.77255 | 0.48576 | 0.9551 | | | | |
| 13 | 2.47298 | 4.43247 | 3.40454 | 2.87901 | 3.47482 | 3.46218 | 3.89595 | 3.06143 | 2.84119 | 2.41019 | 3.66713 |
| | 2.68618 | 4.42225 | 2.77519 | 2.73123 | 3.46354 | 2.40513 | 3.72494 | 3.29354 | 2.67741 | 2.69355 | 4.2469 |
| | 0.0213 | 4.25552 | 4.97786 | 0.61958 | 0.77255 | 0.48576 | 0.9551 | | | | |
| 14 | 2.73996 | 4.49232 | 3.23879 | 2.94928 | 2.69271 | 3.65463 | 3.79189 | 3.01588 | 2.93588 | 2.69147 | 3.60827 |
| | 2.68618 | 4.42225 | 2.77519 | 2.73123 | 3.46354 | 2.40513 | 3.72494 | 3.29354 | 2.67741 | 2.69355 | 4.2469 |
| | 0.0213 | 4.25552 | 4.97786 | 0.61958 | 0.77255 | 0.48576 | 0.9551 | | | | |
| 15 | 2.48769 | 5.06628 | 2.55476 | 2.17819 | 3.95365 | 3.41774 | 3.61498 | 3.83898 | 1.85574 | 3.17541 | 4.11754 |
| | 2.68618 | 4.42225 | 2.77519 | 2.73123 | 3.46354 | 2.40513 | 3.72494 | 3.29354 | 2.67741 | 2.69355 | 4.2469 |
| | 0.04727 | 4.25552 | 3.44244 | 0.61958 | 0.77255 | 0.48576 | 0.9551 | | | | |
| 16 | 2.48405 | 4.22073 | 3.7005 | 3.12776 | 2.55502 | 3.64194 | 3.27538 | 2.48512 | 3.05421 | 2.2444 | 3.32947 |
| | 2.68618 | 4.42225 | 2.77519 | 2.73123 | 3.46354 | 2.40513 | 3.72494 | 3.29354 | 2.67741 | 2.69355 | 4.2469 |
| | 0.02185 | 4.2301 | 4.95245 | 0.61958 | 0.77255 | 0.51883 | 0.90441 | | | | |
| 17 | 3.13366 | 3.92313 | 4.83811 | 4.25221 | 2.78383 | 4.35472 | 4.66344 | 2.16434 | 4.11395 | 0.96672 | 2.5582 |
| | 2.68618 | 4.42225 | 2.77519 | 2.73123 | 3.46354 | 2.40513 | 3.72494 | 3.29354 | 2.67741 | 2.69355 | 4.2469 |
| | 0.02185 | 4.2301 | 4.95245 | 0.61958 | 0.77255 | 0.51883 | 0.90441 | | | | |
| 18 | 2.71352 | 5.1651 | 2.71849 | 2.3519 | 4.49724 | 2.7822 | 3.63847 | 3.96317 | 1.91694 | 3.45632 | 4.22248 |
| | 2.68618 | 4.42225 | 2.77519 | 2.73123 | 3.46354 | 2.40513 | 3.72494 | 3.29354 | 2.67741 | 2.69355 | 4.2469 |
| | 0.02185 | 4.2301 | 4.95245 | 0.61958 | 0.77255 | 0.46563 | 0.98816 | | | | |
| 19 | 3.29145 | 4.5849 | 5.09144 | 4.5213 | 2.86124 | 4.60569 | 4.95187 | 1.22139 | 4.39349 | 1.40019 | 2.67523 |
| | 2.68618 | 4.42225 | 2.77519 | 2.73123 | 3.46354 | 2.40513 | 3.72494 | 3.29354 | 2.67741 | 2.69355 | 4.2469 |
| | 0.0213 | 4.25552 | 4.97786 | 0.61958 | 0.77255 | 0.48576 | 0.9551 | | | | |
| 20 | 2.5071 | 4.38003 | 3.4532 | 2.88775 | 3.52986 | 3.58488 | 3.61016 | 2.669 | 2.73495 | 2.5982 | 3.48719 |
| | 2.68618 | 4.42225 | 2.77519 | 2.73123 | 3.46354 | 2.40513 | 3.72494 | 3.29354 | 2.67741 | 2.69355 | 4.2469 |
| | 0.0213 | 4.25552 | 4.97786 | 0.61958 | 0.77255 | 0.48576 | 0.9551 | | | | |
| 21 | 2.62803 | 4.75161 | 3.07898 | 2.46141 | 3.97002 | 3.47631 | 3.30131 | 3.08914 | 2.40303 | 2.40822 | 3.82851 |
| | 2.68618 | 4.42225 | 2.77519 | 2.73123 | 3.46354 | 2.40513 | 3.72494 | 3.29354 | 2.67741 | 2.69355 | 4.2469 |
| | 0.0213 | 4.25552 | 4.97786 | 0.61958 | 0.77255 | 0.48576 | 0.9551 | | | | |
| 22 | 2.90861 | 5.22831 | 2.27588 | 2.37203 | 4.69297 | 3.33461 | 3.92914 | 4.19276 | 2.88341 | 3.76602 | 4.61584 |
| | 2.68618 | 4.42225 | 2.77519 | 2.73123 | 3.46354 | 2.40513 | 3.72494 | 3.29354 | 2.67741 | 2.69355 | 4.2469 |
| | 0.0213 | 4.25552 | 4.97786 | 0.61958 | 0.77255 | 0.48576 | 0.9551 | | | | |
| 23 | 2.20575 | 4.38127 | 3.4243 | 3.21249 | 4.49761 | 3.11767 | 4.35898 | 3.90077 | 3.31371 | 3.60277 | 4.45076 |
| | 2.68618 | 4.42225 | 2.77519 | 2.73123 | 3.46354 | 2.40513 | 3.72494 | 3.29354 | 2.67741 | 2.69355 | 4.2469 |
| | 0.0213 | 4.25552 | 4.97786 | 0.61958 | 0.77255 | 0.48576 | 0.9551 | | | | |
| 24 | 3.09358 | 5.68885 | 1.00725 | 2.21734 | 4.97028 | 3.34539 | 3.9055 | 4.52687 | 2.93739 | 4.0077 | 4.8622 |
| | 2.68618 | 4.42225 | 2.77519 | 2.73123 | 3.46354 | 2.40513 | 3.72494 | 3.29354 | 2.67741 | 2.69355 | 4.2469 |
| | 0.0213 | 4.25552 | 4.97786 | 0.61958 | 0.77255 | 0.48576 | 0.9551 | | | | |
| 25 | 2.33146 | 4.60859 | 2.75755 | 2.86722 | 4.63275 | 0.94201 | 4.25777 | 4.06508 | 3.27582 | 3.7369 | 4.58297 |
| | 2.68619 | 4.42226 | 2.7751 | 2.73124 | 3.46355 | 2.40514 | 3.72495 | 3.29355 | 2.67742 | 2.69356 | 4.24691 |
| | 0.07416 | 2.73969 | 4.97786 | 0.42151 | 1.06727 | 0.48576 | 0.9551 | | | | |
| 26 | 2.38454 | 4.33004 | 3.59565 | 3.28357 | 4.42041 | 3.11148 | 4.34501 | 3.7987 | 3.29928 | 3.51775 | 4.35848 |
| | 2.68618 | 4.42225 | 2.77519 | 2.73123 | 3.46354 | 2.40513 | 3.72494 | 3.29354 | 2.67741 | 2.69355 | 4.2469 |
| | 0.0213 | 4.25552 | 4.97786 | 0.61958 | 0.77255 | 0.48576 | 0.9551 | | | | |
| 27 | 3.03147 | 3.82107 | 4.83556 | 4.26047 | 2.92881 | 4.29441 | 4.66038 | 1.84664 | 4.11892 | 1.29519 | 3.17251 |
| | 2.68618 | 4.42225 | 2.77519 | 2.73123 | 3.46354 | 2.40513 | 3.72494 | 3.29354 | 2.67741 | 2.69355 | 4.2469 |
| | 0.0213 | 4.25552 | 4.97786 | 0.61958 | 0.77255 | 0.48576 | 0.9551 | | | | |
| 28 | 2.55623 | 3.34433 | 4.00897 | 3.51787 | 3.75796 | 3.44628 | 4.31812 | 2.50251 | 3.39914 | 2.70649 | 3.70826 |
| | 2.68618 | 4.42225 | 2.77519 | 2.73123 | 3.46354 | 2.40513 | 3.72494 | 3.29354 | 2.67741 | 2.69355 | 4.2469 |
| | 0.0213 | 4.25552 | 4.97786 | 0.61958 | 0.77255 | 0.48576 | 0.9551 | | | | |
| 29 | 2.93208 | 3.75576 | 3.62881 | 2.97162 | 4.3204 | 3.65869 | 3.81008 | 3.6711 | 2.13704 | 3.26094 | 4.14624 |
| | 2.68618 | 4.42225 | 2.77519 | 2.73123 | 3.46354 | 2.40513 | 3.72494 | 3.29354 | 2.67741 | 2.69355 | 4.2469 |
| | 0.04839 | 4.25552 | 3.40981 | 0.61958 | 0.77255 | 0.48576 | 0.9551 | | | | |
| 30 | 2.54708 | 4.90962 | 2.76214 | 2.41345 | 3.89732 | 3.43334 | 3.29521 | 3.6061 | 2.40981 | 2.90911 | 3.97281 |
| | 2.68618 | 4.42225 | 2.77519 | 2.73123 | 3.46354 | 2.40513 | 3.72494 | 3.29354 | 2.67741 | 2.69355 | 4.2469 |
| | 0.02188 | 4.22901 | 4.95136 | 0.61958 | 0.77255 | 0.5202 | 0.90239 | | | | |
| 31 | 2.60652 | 4.28625 | 3.55578 | 2.98681 | 3.1365 | 3.22339 | 3.86541 | 2.63665 | 2.93303 | 2.10958 | 3.39293 |
| | 2.68618 | 4.42225 | 2.77519 | 2.73123 | 3.46354 | 2.40513 | 3.72494 | 3.29354 | 2.67741 | 2.69355 | 4.2469 |
| | 0.02188 | 4.22901 | 4.95136 | 0.61958 | 0.77255 | 0.5202 | 0.90239 | | | | |
| 32 | 2.57655 | 4.18133 | 2.6128 | 2.24332 | 4.194 | 3.27508 | 3.62824 | 3.62945 | 2.21816 | 3.07846 | 3.68912 |
| | 2.68618 | 4.42225 | 2.77519 | 2.73123 | 3.46354 | 2.40513 | 3.72494 | 3.29354 | 2.67741 | 2.69355 | 4.2469 |
| | 0.05407 | 4.22901 | 3.26833 | 0.61958 | 0.77255 | 0.5202 | 0.90239 | | | | |
| 33 | 2.43549 | 4.1946 | 3.49837 | 3.13013 | 2.6266 | 3.62993 | 3.34687 | 2.40398 | 2.96131 | 2.1902 | 3.30392 |
| | 2.6862 | 4.42227 | 2.77521 | 2.73125 | 3.46318 | 2.40515 | 3.72496 | 3.29356 | 2.67743 | 2.69357 | 4.24692 |
| | 0.14273 | 2.07379 | 4.91987 | 0.31478 | 1.30915 | 0.44282 | 1.02785 | | | | |
| 34 | 2.57139 | 4.50456 | 3.38791 | 3.15943 | 4.24021 | 3.24832 | 4.26813 | 3.7144 | 3.16197 | 3.19789 | 4.34698 |
| | 2.68618 | 4.42225 | 2.77519 | 2.73123 | 3.46354 | 2.40513 | 3.72494 | 3.29354 | 2.67741 | 2.69355 | 4.2469 |
| | 0.0213 | 4.25552 | 4.97786 | 0.61958 | 0.77255 | 0.48576 | 0.9551 | | | | |
| 35 | 2.62406 | 4.0722 | 3.00641 | 2.46344 | 3.90714 | 3.48517 | 3.51516 | 3.1024 | 2.4237 | 2.603 | 3.78153 |
| | 2.68618 | 4.42225 | 2.77519 | 2.73123 | 3.46354 | 2.40513 | 3.72494 | 3.29354 | 2.67741 | 2.69355 | 4.2469 |
| | 0.0213 | 4.25552 | 4.97786 | 0.61958 | 0.77255 | 0.48576 | 0.9551 | | | | |
| 36 | 2.63863 | 4.21241 | 4.10815 | 3.53968 | 3.37574 | 3.82852 | 4.18783 | 2.15385 | 3.43691 | 1.94731 | 3.33898 |
| | 2.68618 | 4.42225 | 2.77519 | 2.73123 | 3.46354 | 2.40513 | 3.72494 | 3.29354 | 2.67741 | 2.69355 | 4.2469 |
| | 0.0213 | 4.25552 | 4.97786 | 0.61958 | 0.77255 | 0.48576 | 0.9551 | | | | |
| 37 | 2.44402 | 4.92605 | 2.82999 | 2.26477 | 4.19092 | 3.43704 | 3.65541 | 3.62256 | 2.44347 | 3.19924 | 3.99706 |
| | 2.68618 | 4.42225 | 2.77519 | 2.73123 | 3.46354 | 2.40513 | 3.72494 | 3.29354 | 2.67741 | 2.69355 | 4.2469 |
| | 0.0213 | 4.25552 | 4.97786 | 0.61958 | 0.77255 | 0.48576 | 0.9551 | | | | |
| 38 | 2.06142 | 4.68315 | 2.99137 | 2.57347 | 3.92558 | 3.46724 | 3.72229 | 3.17286 | 2.49658 | 2.75494 | 3.80199 |
| | 2.68618 | 4.42225 | 2.77519 | 2.73123 | 3.46354 | 2.40513 | 3.72494 | 3.29354 | 2.67741 | 2.69355 | 4.2469 |
| | 0.0213 | 4.25552 | 4.97786 | 0.61958 | 0.77255 | 0.48576 | 0.9551 | | | | |
| 39 | 2.43112 | 4.94294 | 2.73453 | 2.33796 | 4.24985 | 3.41808 | 3.65886 | 3.68913 | 2.44198 | 3.25309 | 4.04181 |
| | 2.68618 | 4.42225 | 2.77519 | 2.73123 | 3.46354 | 2.40513 | 3.72494 | 3.29354 | 2.67741 | 2.69355 | 4.2469 |
| | 0.0213 | 4.25552 | 4.97786 | 0.61958 | 0.77255 | 0.48576 | 0.9551 | | | | |
| 40 | 2.61022 | 5.0076 | 2.54438 | 2.20551 | 4.31413 | 2.92472 | 3.69421 | 3.45771 | 2.50376 | 3.31933 | 4.11535 |
| | 2.68613 | 4.42227 | 2.77512 | 2.73118 | 3.46356 | 2.40515 | 3.72497 | 3.29356 | 2.67743 | 2.69357 | 4.24692 |
| | 0.1859 | 1.98299 | 3.44244 | 0.28909 | 1.38209 | 0.48576 | 0.9551 | | | | |
| 41 | 2.50594 | 5.12907 | 2.16441 | 2.17619 | 4.44596 | 3.24587 | 3.63132 | 3.91774 | 2.40334 | 3.26819 | 4.18518 |
| | 2.68618 | 4.42225 | 2.77519 | 2.73123 | 3.46354 | 2.40513 | 3.72494 | 3.29354 | 2.67741 | 2.69355 | 4.2469 |
| | 0.04271 | 4.2301 | 3.6025 | 0.61958 | 0.77255 | 0.46563 | 0.98816 | | | | |
| 42 | 2.43273 | 4.45224 | 3.32672 | 2.67828 | 3.46154 | 3.19626 | 3.57269 | 2.88541 | 2.73136 | 2.37107 | 3.55001 |
| | 2.68618 | 4.42225 | 2.77519 | 2.73123 | 3.46354 | 2.40513 | 3.72494 | 3.29354 | 2.67741 | 2.69355 | 4.2469 |
| | 0.02173 | 4.23564 | 4.95798 | 0.61958 | 0.77255 | 0.51178 | 0.91485 | | | | |
| 43 | 2.53076 | 4.2533 | 2.78041 | 2.303 | 3.98666 | 3.46117 | 3.678 | 2.95489 | 2.49702 | 3.01573 | 3.84078 |
| | 2.68618 | 4.42225 | 2.77519 | 2.73123 | 3.46354 | 2.40513 | 3.72494 | 3.29354 | 2.67741 | 2.69355 | 4.2469 |
| | 0.14374 | 4.23564 | 2.12511 | 0.61958 | 0.77255 | 0.51178 | 0.91485 | | | | |
| 44 | 2.41809 | 4.60677 | 3.10443 | 2.57679 | 3.89136 | 3.18884 | 3.2356 | 3.2878 | 2.56095 | 2.69666 | 3.77607 |
| | 2.68618 | 4.42225 | 2.77519 | 2.73123 | 3.46354 | 2.40513 | 3.72494 | 3.29354 | 2.67741 | 2.69355 | 4.2469 |
| | 0.02452 | 4.11641 | 4.83876 | 0.61958 | 0.77255 | 0.64612 | 0.74249 | | | | |
| 45 | 2.46812 | 4.8969 | 2.63698 | 2.27415 | 4.17091 | 2.73607 | 3.61436 | 3.60494 | 2.39812 | 3.08692 | 3.97031 |
| | 2.68618 | 4.42225 | 2.77519 | 2.73123 | 3.46354 | 2.40513 | 3.72494 | 3.29354 | 2.67741 | 2.69355 | 4.2469 |
| | 0.04517 | 4.11641 | 3.58037 | 0.61958 | 0.77255 | 0.64612 | 0.74249 | | | | |
| 46 | 2.3075 | 4.66654 | 3.05527 | 2.40601 | 3.89215 | 3.21979 | 3.6661 | 3.03209 | 2.42765 | 2.7747 | 3.76439 |
| | 2.68602 | 4.42237 | 2.77515 | 2.73105 | 3.46366 | 2.40516 | 3.72507 | 3.29344 | 2.67748 | 2.69367 | 4.24702 |
| | 0.22448 | 1.64512 | 4.81861 | 1.22198 | 0.34906 | 0.51688 | 0.90728 | | | | |
| 47 | 2.49806 | 4.46973 | 3.28676 | 2.73345 | 3.68782 | 3.24592 | 3.7795 | 3.05723 | 2.69223 | 2.37261 | 3.61507 |
| | 2.68618 | 4.42225 | 2.77519 | 2.73123 | 3.46354 | 2.40513 | 3.72494 | 3.29354 | 2.67741 | 2.69355 | 4.2469 |
| | 0.02301 | 4.17918 | 4.90153 | 0.61958 | 0.77255 | 0.57965 | 0.8212 | | | | |
| 48 | 1.98571 | 4.23793 | 3.80646 | 3.27496 | 3.55955 | 3.53029 | 4.10193 | 2.42909 | 3.20483 | 2.56808 | 3.51392 |
| | 2.68618 | 4.42225 | 2.77519 | 2.73123 | 3.46354 | 2.40513 | 3.72494 | 3.29354 | 2.67741 | 2.69355 | 4.2469 |
| | 0.02301 | 4.17918 | 4.90153 | 0.61958 | 0.77255 | 0.53544 | 0.88047 | | | | |
| 49 | 2.52321 | 4.15057 | 3.86583 | 3.29091 | 2.86312 | 3.67168 | 3.42234 | 2.58852 | 3.19417 | 1.74174 | 3.2549 |
| | 2.68618 | 4.42225 | 2.77519 | 2.73123 | 3.46354 | 2.40513 | 3.72494 | 3.29354 | 2.67741 | 2.69355 | 4.2469 |
| | 0.0225 | 4.20135 | 4.92369 | 0.61958 | 0.77255 | 0.44534 | 1.02334 | | | | |
| 50 | 2.57415 | 3.70327 | 3.54281 | 2.99502 | 2.88557 | 3.50393 | 3.67525 | 2.93372 | 2.94353 | 2.64768 | 3.53896 |
| | 2.68618 | 4.42225 | 2.77519 | 2.73123 | 3.46354 | 2.40513 | 3.72494 | 3.29354 | 2.67741 | 2.69355 | 4.2469 |
| | 0.0213 | 4.25552 | 4.97786 | 0.61958 | 0.77255 | 0.48576 | 0.9551 | | | | |
| 51 | 3.03784 | 5.20192 | 3.34441 | 2.79178 | 4.67364 | 3.6687 | 3.73953 | 4.05042 | 1.01628 | 3.51995 | 4.37009 |
| | 2.68618 | 4.42225 | 2.77519 | 2.73123 | 3.46354 | 2.40513 | 3.72494 | 3.29354 | 2.67741 | 2.69355 | 4.2469 |
| | 0.0213 | 4.25552 | 4.97786 | 0.61958 | 0.77255 | 0.48576 | 0.9551 | | | | |
| 52 | 3.45489 | 5.58801 | 0.49459 | 2.66181 | 5.02904 | 3.55014 | 4.33669 | 4.71613 | 3.50291 | 4.26044 | 5.2638 |
| | 2.68618 | 4.42225 | 2.77519 | 2.73123 | 3.46354 | 2.40513 | 3.72494 | 3.29354 | 2.67741 | 2.69355 | 4.2469 |
| | 0.0213 | 4.25552 | 4.97786 | 0.61958 | 0.77255 | 0.48576 | 0.9551 | | | | |
| 53 | 3.2969 | 4.54806 | 5.17406 | 4.66171 | 3.64699 | 4.76175 | 5.30335 | 1.05901 | 4.56121 | 1.86412 | 3.42387 |
| | 2.68618 | 4.42225 | 2.77519 | 2.73123 | 3.46354 | 2.40513 | 3.72494 | 3.29354 | 2.67741 | 2.69355 | 4.2469 |
| | 0.0213 | 4.25552 | 4.97786 | 0.61958 | 0.77255 | 0.48576 | 0.9551 | | | | |
| 54 | 2.51523 | 4.42651 | 3.44965 | 2.99116 | 3.99447 | 3.31959 | 4.03957 | 2.9669 | 2.94654 | 3.03715 | 3.92065 |
| | 2.68618 | 4.42225 | 2.77519 | 2.73123 | 3.46354 | 2.40513 | 3.72494 | 3.29354 | 2.67741 | 2.69355 | 4.2469 |
| | 0.0213 | 4.25552 | 4.97786 | 0.61958 | 0.77255 | 0.48576 | 0.9551 | | | | |
| 55 | 3.09752 | 4.45738 | 4.74599 | 4.17112 | 3.20323 | 4.31658 | 4.61812 | 1.7523 | 4.02848 | 1.12071 | 3.09044 |
| | 2.68618 | 4.42225 | 2.77519 | 2.73123 | 3.46354 | 2.40513 | 3.72494 | 3.29354 | 2.67741 | 2.69355 | 4.2469 |
| | 0.0213 | 4.25552 | 4.97786 | 0.61958 | 0.77255 | 0.48576 | 0.9551 | | | | |
| 56 | 2.95093 | 5.36942 | 2.06163 | 2.30169 | 4.78524 | 3.33332 | 3.90261 | 4.31652 | 2.88264 | 3.84293 | 4.68099 |
| | 2.68618 | 4.42225 | 2.77519 | 2.73123 | 3.46354 | 2.40513 | 3.72494 | 3.29354 | 2.67741 | 2.69355 | 4.2469 |
| | 0.0213 | 4.25552 | 4.97786 | 0.61958 | 0.77255 | 0.48576 | 0.9551 | | | | |
| 57 | 2.49505 | 5.01318 | 2.73197 | 2.37818 | 4.30747 | 3.42483 | 3.31799 | 3.4409 | 2.18505 | 3.29665 | 4.07007 |
| | 2.68618 | 4.42225 | 2.77519 | 2.73123 | 3.46354 | 2.40513 | 3.72494 | 3.29354 | 2.67741 | 2.69355 | 4.2469 |
| | 0.0213 | 4.25552 | 4.97786 | 0.61958 | 0.77255 | 0.48576 | 0.9551 | | | | |
| 58 | 2.32785 | 5.06295 | 2.5553 | 2.14521 | 4.36867 | 3.41263 | 3.63946 | 3.82674 | 2.41158 | 3.24953 | 4.12734 |
| | 2.68618 | 4.42225 | 2.77519 | 2.73123 | 3.46354 | 2.40513 | 3.72494 | 3.29354 | 2.67741 | 2.69355 | 4.2469 |
| | 0.0213 | 4.25552 | 4.97786 | 0.61958 | 0.77255 | 0.48576 | 0.9551 | | | | |
| 59 | 2.58408 | 5.04757 | 2.91658 | 2.41742 | 4.36735 | 3.44485 | 3.28417 | 3.81115 | 1.88888 | 3.34431 | 4.1289 |
| | 2.68618 | 4.42225 | 2.77519 | 2.73123 | 3.46354 | 2.40513 | 3.72494 | 3.29354 | 2.67741 | 2.69355 | 4.2469 |
| | 0.0213 | 4.25552 | 4.97786 | 0.61958 | 0.77255 | 0.48576 | 0.9551 | | | | |
| 60 | 2.67551 | 5.11786 | 2.86099 | 2.2947 | 4.44275 | 2.77213 | 3.62687 | 3.90806 | 2.05061 | 3.41107 | 4.17233 |
| | 2.68618 | 4.42225 | 2.77519 | 2.73123 | 3.46354 | 2.40513 | 3.72494 | 3.29354 | 2.67741 | 2.69355 | 4.2469 |
| | 0.0213 | 4.25552 | 4.97786 | 0.61958 | 0.77255 | 0.48576 | 0.9551 | | | | |
| 61 | 2.6752 | 4.38485 | 3.94962 | 3.47431 | 3.78519 | 3.58218 | 4.36024 | 2.42683 | 3.36171 | 2.60602 | 3.69799 |
| | 2.68618 | 4.42225 | 2.77519 | 2.73123 | 3.46354 | 2.40513 | 3.72494 | 3.29354 | 2.67741 | 2.69355 | 4.2469 |
| | 0.0213 | 4.25552 | 4.97786 | 0.61958 | 0.77255 | 0.48576 | 0.9551 | | | | |
| 62 | 2.74023 | 4.27007 | 3.95316 | 3.39508 | 2.21757 | 3.24876 | 3.88109 | 2.74526 | 3.28785 | 2.45056 | 3.38906 |
| | 2.68618 | 4.42225 | 2.77519 | 2.73123 | 3.46354 | 2.40513 | 3.72494 | 3.29354 | 2.67741 | 2.69355 | 4.2469 |
| | 0.0213 | 4.25552 | 4.97786 | 0.61958 | 0.77255 | 0.48576 | 0.9551 | | | | |
| 63 | 2.47751 | 4.32335 | 4.57047 | 3.99043 | 2.93453 | 4.13362 | 4.46921 | 2.15166 | 3.86231 | 1.36854 | 2.88249 |
| | 2.68618 | 4.42225 | 2.77519 | 2.73123 | 3.46354 | 2.40513 | 3.72494 | 3.29354 | 2.67741 | 2.69355 | 4.2469 |
| | 0.0213 | 4.25552 | 4.97786 | 0.61958 | 0.77255 | 0.48576 | 0.9551 | | | | |
| 64 | 3.49583 | 5.27252 | 4.0307 | 3.48176 | 4.72839 | 3.88626 | 4.181 | 4.31306 | 2.49598 | 3.75907 | 4.76361 |
| | 2.68618 | 4.42225 | 2.77519 | 2.73123 | 3.46354 | 2.40513 | 3.72494 | 3.29354 | 2.67741 | 2.69355 | 4.2469 |
| | 0.0213 | 4.25552 | 4.97786 | 0.61958 | 0.77255 | 0.48576 | 0.9551 | | | | |
| 65 | 3.39897 | 4.66895 | 5.18289 | 4.6399 | 3.35134 | 4.77256 | 5.17956 | 1.40889 | 4.51103 | 1.06135 | 3.12718 |
| | 2.68618 | 4.42225 | 2.77519 | 2.73123 | 3.46354 | 2.40513 | 3.72494 | 3.29354 | 2.67741 | 2.69355 | 4.2469 |
| | 0.0213 | 4.25552 | 4.97786 | 0.61958 | 0.77255 | 0.48576 | 0.9551 | | | | |
| 66 | 4.03171 | 5.15176 | 4.9864 | 4.76441 | 1.03859 | 4.69029 | 3.58318 | 3.66248 | 4.58458 | 2.92483 | 4.23313 |
| | 2.68618 | 4.42225 | 2.77519 | 2.73123 | 3.46354 | 2.40513 | 3.72494 | 3.29354 | 2.67741 | 2.69355 | 4.2469 |
| | 0.0213 | 4.25552 | 4.97786 | 0.61958 | 0.77255 | 0.48576 | 0.9551 | | | | |
| 67 | 2.60001 | 4.01559 | 3.52525 | 2.94265 | 3.57277 | 3.62175 | 3.85913 | 2.87602 | 2.66258 | 1.95829 | 3.51841 |
| | 2.68618 | 4.42225 | 2.77519 | 2.73123 | 3.46354 | 2.40513 | 3.72494 | 3.29354 | 2.67741 | 2.69355 | 4.2469 |
| | 0.0213 | 4.25552 | 4.97786 | 0.61958 | 0.77255 | 0.48576 | 0.9551 | | | | |
| 68 | 3.34403 | 5.01806 | 3.99464 | 3.90067 | 4.83531 | 3.68485 | 4.93048 | 4.50058 | 3.99508 | 4.07601 | 5.15317 |
| | 2.68624 | 4.42231 | 2.77526 | 2.7313 | 3.4636 | 2.40519 | 3.72501 | 3.29343 | 2.67747 | 2.69361 | 4.24696 |
| | 0.10652 | 3.05267 | 2.92226 | 1.44843 | 0.2678 | 0.48576 | 0.9551 | | | | |
| 69 | 2.55117 | 4.7618 | 3.06314 | 2.50467 | 3.99427 | 3.46137 | 3.48497 | 3.40061 | 2.40879 | 2.92192 | 3.84451 |
| | 2.68618 | 4.42225 | 2.77519 | 2.73123 | 3.46354 | 2.40513 | 3.72494 | 3.29354 | 2.67741 | 2.69355 | 4.2469 |
| | 0.02236 | 4.20746 | 4.9298 | 0.61958 | 0.77255 | 0.49133 | 0.94627 | | | | |
| 70 | 2.56411 | 5.04965 | 2.70387 | 2.30316 | 4.35826 | 3.12173 | 3.6087 | 3.81895 | 2.16106 | 3.10089 | 4.10159 |
| | 2.68595 | 4.42197 | 2.77513 | 2.73135 | 3.46366 | 2.40524 | 3.72506 | 3.29366 | 2.67752 | 2.69325 | 4.24701 |
| | 0.30874 | 1.43126 | 3.62615 | 0.92349 | 0.50605 | 0.5132 | 0.91275 | | | | |
| 71 | 2.50555 | 4.72414 | 2.86941 | 2.47129 | 3.94827 | 3.46074 | 3.68229 | 3.08718 | 2.50999 | 2.68833 | 3.81165 |
| | 2.68618 | 4.42225 | 2.77519 | 2.73123 | 3.46354 | 2.40513 | 3.72494 | 3.29354 | 2.67741 | 2.69355 | 4.2469 |
| | 0.0222 | 4.21476 | 4.9371 | 0.61958 | 0.77255 | 0.49367 | 0.9426 | | | | |
| 72 | 2.47978 | 4.79346 | 2.92515 | 2.49358 | 4.11532 | 2.99681 | 3.69883 | 3.53503 | 2.50706 | 2.94697 | 3.94872 |
| | 2.68618 | 4.42225 | 2.77519 | 2.73123 | 3.46354 | 2.40513 | 3.72494 | 3.29354 | 2.67741 | 2.69355 | 4.2469 |
| | 0.02172 | 4.23615 | 4.9585 | 0.61958 | 0.77255 | 0.51112 | 0.91584 | | | | |
| 73 | 2.51652 | 5.04278 | 2.35508 | 2.35664 | 4.07333 | 3.01732 | 3.62311 | 3.81118 | 2.33308 | 3.33843 | 4.10612 |
| | 2.68618 | 4.42225 | 2.77519 | 2.73123 | 3.46354 | 2.40513 | 3.72494 | 3.29354 | 2.67741 | 2.69355 | 4.2469 |
| | 0.02172 | 4.23615 | 4.9585 | 0.61958 | 0.77255 | 0.51112 | 0.91584 | | | | |
| 74 | 2.4036 | 4.97197 | 2.94459 | 2.28813 | 4.25551 | 3.42854 | 3.08243 | 3.69814 | 2.33949 | 3.13083 | 4.03101 |
| | 2.68618 | 4.42225 | 2.7752 | 2.73123 | 3.46354 | 2.40509 | 3.72495 | 3.29354 | 2.67741 | 2.69355 | 4.2469 |
| | 0.07519 | 3.39218 | 3.24944 | 0.52674 | 0.89288 | 0.47022 | 0.98046 | | | | |
| 75 | 2.36557 | 5.00022 | 2.5047 | 2.29532 | 4.32719 | 3.39386 | 3.66439 | 3.77666 | 2.45668 | 3.32577 | 4.10981 |
| | 2.68618 | 4.42225 | 2.77519 | 2.73123 | 3.46354 | 2.40513 | 3.72494 | 3.29354 | 2.67741 | 2.69355 | 4.2469 |
| | 0.10324 | 4.22386 | 2.48352 | 0.61958 | 0.77255 | 0.52665 | 0.89301 | | | | |
| 76 | 2.37005 | 4.78587 | 2.89583 | 2.45451 | 4.07558 | 2.86288 | 3.65932 | 3.49383 | 2.30297 | 3.09654 | 3.90856 |
| | 2.68618 | 4.42225 | 2.77519 | 2.73123 | 3.46354 | 2.40513 | 3.72494 | 3.29354 | 2.67741 | 2.69355 | 4.2469 |
| | 0.0439 | 4.14445 | 3.60841 | 0.61958 | 0.77255 | 0.61749 | 0.775 | | | | |
| 77 | 2.2382 | 4.92392 | 2.92666 | 2.38657 | 4.20323 | 2.98808 | 3.42033 | 3.6382 | 2.19866 | 3.04102 | 3.99042 |
| | 2.68618 | 4.42225 | 2.77519 | 2.73123 | 3.46354 | 2.40513 | 3.72494 | 3.29354 | 2.67741 | 2.69355 | 4.2469 |
| | 0.02431 | 4.12486 | 4.84721 | 0.61958 | 0.77255 | 0.4013 | 1.107 | | | | |
| 78 | 3.19412 | 5.32193 | 3.68555 | 2.93841 | 4.78873 | 3.82072 | 3.70741 | 4.11892 | 1.10927 | 3.26775 | 4.40561 |
| | 2.68618 | 4.42225 | 2.77519 | 2.73123 | 3.46354 | 2.40513 | 3.72494 | 3.29354 | 2.67741 | 2.69355 | 4.2469 |
| | 0.0213 | 4.25552 | 4.97786 | 0.61958 | 0.77255 | 0.48576 | 0.9551 | | | | |
| 79 | 3.53779 | 4.88359 | 4.9722 | 4.50399 | 3.18088 | 4.67427 | 5.01813 | 2.25476 | 4.25136 | 0.62548 | 3.04227 |
| | 2.68618 | 4.42225 | 2.77519 | 2.73123 | 3.46354 | 2.40513 | 3.72494 | 3.29354 | 2.67741 | 2.69355 | 4.2469 |
| | 0.0213 | 4.25552 | 4.97786 | 0.61958 | 0.77255 | 0.48576 | 0.9551 | | | | |
| 80 | 3.34403 | 5.01806 | 3.99464 | 3.90067 | 4.83531 | 3.68485 | 4.93048 | 4.50058 | 3.99508 | 4.07601 | 5.15317 |
| | 2.68618 | 4.42225 | 2.77519 | 2.73123 | 3.46354 | 2.40513 | 3.72494 | 3.29354 | 2.67741 | 2.69355 | 4.2469 |
| | 0.0213 | 4.25552 | 4.97786 | 0.61958 | 0.77255 | 0.48576 | 0.9551 | | | | |
| 81 | 3.33414 | 4.60031 | 5.16347 | 4.62514 | 3.43761 | 4.73363 | 5.17762 | 1.37077 | 4.50893 | 1.24191 | 3.21741 |
| | 2.68618 | 4.42225 | 2.77519 | 2.73123 | 3.46354 | 2.40513 | 3.72494 | 3.29354 | 2.67741 | 2.69355 | 4.2469 |
| | 0.0213 | 4.25552 | 4.97786 | 0.61958 | 0.77255 | 0.48576 | 0.9551 | | | | |
| 82 | 3.292 | 4.54513 | 5.17125 | 4.65208 | 3.60993 | 4.74672 | 5.26682 | 1.17401 | 4.55049 | 1.71895 | 3.38924 |
| | 2.68618 | 4.42225 | 2.77519 | 2.73123 | 3.46354 | 2.40513 | 3.72494 | 3.29354 | 2.67741 | 2.69355 | 4.2469 |
| | 0.0213 | 4.25552 | 4.97786 | 0.61958 | 0.77255 | 0.48576 | 0.9551 | | | | |
| 83 | 3.28325 | 4.53586 | 5.16709 | 4.64982 | 3.63354 | 4.74272 | 5.27171 | 1.25881 | 4.55018 | 1.76836 | 3.41367 |
| | 2.68618 | 4.42225 | 2.77519 | 2.73123 | 3.46354 | 2.40513 | 3.72494 | 3.29354 | 2.67741 | 2.69355 | 4.2469 |
| | 0.0213 | 4.25552 | 4.97786 | 0.61958 | 0.77255 | 0.48576 | 0.9551 | | | | |
| 84 | 3.91195 | 5.12186 | 4.76206 | 4.46281 | 1.66798 | 4.58974 | 2.86357 | 3.73412 | 4.30503 | 3.04323 | 4.28664 |
| | 2.68618 | 4.42225 | 2.77519 | 2.73123 | 3.46354 | 2.40513 | 3.72494 | 3.29354 | 2.67741 | 2.69355 | 4.2469 |
| | 0.0213 | 4.25552 | 4.97786 | 0.61958 | 0.77255 | 0.48576 | 0.9551 | | | | |
| 85 | 3.24584 | 4.59746 | 4.64092 | 4.15596 | 1.14932 | 4.26725 | 3.8925 | 2.65965 | 4.00611 | 2.16645 | 3.48035 |
| | 2.68618 | 4.42225 | 2.77519 | 2.73123 | 3.46354 | 2.40513 | 3.72494 | 3.29354 | 2.67741 | 2.69355 | 4.2469 |
| | 0.0213 | 4.25552 | 4.97786 | 0.61958 | 0.77255 | 0.48576 | 0.9551 | | | | |
| 86 | 3.5141 | 5.23055 | 3.59545 | 3.41016 | 3.63357 | 3.83874 | 0.54184 | 4.27958 | 3.24679 | 3.71577 | 4.8026 |
| | 2.68618 | 4.42225 | 2.77519 | 2.73123 | 3.46354 | 2.40513 | 3.72494 | 3.29354 | 2.67741 | 2.69355 | 4.2469 |
| | 0.0213 | 4.25552 | 4.97786 | 0.61958 | 0.77255 | 0.48576 | 0.9551 | | | | |
| 87 | 2.48654 | 4.47887 | 3.1466 | 3.03623 | 4.63948 | 0.91669 | 4.34061 | 4.15339 | 3.33413 | 3.79889 | 4.62401 |
| | 2.68618 | 4.42225 | 2.77519 | 2.73123 | 3.46354 | 2.40513 | 3.72494 | 3.29354 | 2.67741 | 2.69355 | 4.2469 |
| | 0.0213 | 4.25552 | 4.97786 | 0.61958 | 0.77255 | 0.48576 | 0.9551 | | | | |
| 88 | 2.43732 | 4.38898 | 3.43238 | 3.3142 | 4.67367 | 0.85033 | 4.50634 | 4.18462 | 3.54341 | 3.85592 | 4.68173 |
| | 2.68618 | 4.42225 | 2.77519 | 2.73123 | 3.46354 | 2.40513 | 3.72494 | 3.29354 | 2.67741 | 2.69355 | 4.2469 |
| | 0.0213 | 4.25552 | 4.97786 | 0.61958 | 0.77255 | 0.48576 | 0.9551 | | | | |
| 89 | 2.48302 | 4.42572 | 3.42777 | 3.33446 | 4.68012 | 0.75761 | 4.53494 | 4.21053 | 3.57682 | 3.8896 | 4.73139 |
| | 2.68618 | 4.42225 | 2.77519 | 2.73123 | 3.46354 | 2.40513 | 3.72494 | 3.29354 | 2.67741 | 2.69355 | 4.2469 |
| | 0.0213 | 4.25552 | 4.97786 | 0.61958 | 0.77255 | 0.48576 | 0.9551 | | | | |
| 90 | 3.45123 | 4.74457 | 4.76377 | 4.34485 | 0.9128 | 4.38 | 3.72076 | 3.13876 | 4.17526 | 2.53937 | 3.15414 |
| | 2.68618 | 4.42225 | 2.77519 | 2.73123 | 3.46354 | 2.40513 | 3.72494 | 3.29354 | 2.67741 | 2.69355 | 4.2469 |
| | 0.0213 | 4.25552 | 4.97786 | 0.61958 | 0.77255 | 0.48576 | 0.9551 | | | | |
| 91 | 3.27809 | 4.52947 | 5.16227 | 4.66292 | 3.73986 | 4.75469 | 5.34698 | 1.28533 | 4.56683 | 2.11511 | 3.51654 |
| | 2.68618 | 4.42225 | 2.77519 | 2.73123 | 3.46354 | 2.40513 | 3.72494 | 3.29354 | 2.67741 | 2.69355 | 4.2469 |
| | 0.0213 | 4.25552 | 4.97786 | 0.61958 | 0.77255 | 0.48576 | 0.9551 | | | | |
| 92 | 3.31181 | 4.61513 | 5.09693 | 4.51309 | 2.42796 | 4.58582 | 4.89103 | 1.93601 | 4.37544 | 0.99721 | 2.6995 |
| | 2.68618 | 4.42225 | 2.77519 | 2.73123 | 3.46354 | 2.40513 | 3.72494 | 3.29354 | 2.67741 | 2.69355 | 4.2469 |
| | 0.0213 | 4.25552 | 4.97786 | 0.61958 | 0.77255 | 0.48576 | 0.9551 | | | | |
| 93 | 2.42489 | 2.89568 | 4.26787 | 3.67504 | 2.35307 | 3.75528 | 4.05709 | 2.42 | 3.52393 | 1.91889 | 3.16797 |
| | 2.68618 | 4.42225 | 2.77519 | 2.73123 | 3.46354 | 2.40513 | 3.72494 | 3.29354 | 2.67741 | 2.69355 | 4.2469 |
| | 0.0213 | 4.25552 | 4.97786 | 0.61958 | 0.77255 | 0.48576 | 0.9551 | | | | |
| 94 | 2.6689 | 4.76953 | 3.08531 | 2.65838 | 4.22485 | 3.39832 | 3.53907 | 3.67922 | 2.56446 | 3.27754 | 4.10936 |
| | 2.68618 | 4.42225 | 2.77519 | 2.73123 | 3.46354 | 2.40513 | 3.72494 | 3.29354 | 2.67741 | 2.69355 | 4.2469 |
| | 0.0213 | 4.25552 | 4.97786 | 0.61958 | 0.77255 | 0.48576 | 0.9551 | | | | |
| 95 | 1.24467 | 4.2906 | 3.79855 | 3.36088 | 3.92698 | 3.31343 | 4.27409 | 2.99526 | 3.31074 | 2.92265 | 3.86557 |
| | 2.68618 | 4.42225 | 2.77519 | 2.73123 | 3.46354 | 2.40513 | 3.72494 | 3.29354 | 2.67741 | 2.69355 | 4.2469 |
| | 0.0213 | 4.25552 | 4.97786 | 0.61958 | 0.77255 | 0.48576 | 0.9551 | | | | |
| 96 | 1.81174 | 4.97888 | 2.27992 | 2.35233 | 4.35005 | 3.38339 | 3.72643 | 3.79388 | 2.54816 | 3.35863 | 4.1546 |
| | 2.68618 | 4.42225 | 2.77519 | 2.73123 | 3.46354 | 2.40513 | 3.72494 | 3.29354 | 2.67741 | 2.69355 | 4.2469 |
| | 0.0213 | 4.25552 | 4.97786 | 0.61958 | 0.77255 | 0.48576 | 0.9551 | | | | |
| 97 | 2.50149 | 4.6684 | 3.00833 | 2.57649 | 3.68742 | 3.48823 | 3.33848 | 3.26916 | 2.56256 | 2.83978 | 3.38488 |
| | 2.68618 | 4.42225 | 2.77519 | 2.73123 | 3.46354 | 2.40513 | 3.72494 | 3.29354 | 2.67741 | 2.69355 | 4.2469 |
| | 0.04041 | 4.25552 | 3.67217 | 0.61958 | 0.77255 | 0.48576 | 0.9551 | | | | |
| 98 | 2.28347 | 4.59251 | 3.18671 | 2.62694 | 3.57625 | 3.07578 | 3.73009 | 3.16659 | 2.54968 | 2.58303 | 3.68484 |
| | 2.68618 | 4.42225 | 2.77519 | 2.73123 | 3.46354 | 2.40513 | 3.72494 | 3.29354 | 2.67741 | 2.69355 | 4.2469 |
| | 0.02171 | 4.23681 | 4.95916 | 0.61958 | 0.77255 | 0.51028 | 0.91711 | | | | |
| 99 | 2.46026 | 4.19767 | 3.73923 | 3.16479 | 3.01682 | 3.42545 | 3.92465 | 2.28309 | 3.09077 | 2.25911 | 2.84623 |
| | 2.68618 | 4.42225 | 2.77519 | 2.73123 | 3.46354 | 2.40513 | 3.72494 | 3.29354 | 2.67741 | 2.69355 | 4.2469 |
| | 0.02171 | 4.23681 | 4.95916 | 0.61958 | 0.77255 | 0.47073 | 0.97962 | | | | |
| 100 | 2.64539 | 3.49328 | 3.50742 | 3.34387 | 1.72824 | 3.7061 | 3.95929 | 2.55477 | 3.25032 | 2.36467 | 3.29097 |
| | 2.68618 | 4.42225 | 2.77519 | 2.73123 | 3.46354 | 2.40513 | 3.72494 | 3.29354 | 2.67741 | 2.69355 | 4.2469 |
| | 0.0213 | 4.25552 | 4.97786 | 0.61958 | 0.77255 | 0.48576 | 0.9551 | | | | |
| 101 | 2.92034 | 5.26854 | 2.37287 | 2.36847 | 4.40694 | 3.42588 | 1.40936 | 4.02235 | 2.63506 | 3.55809 | 4.39678 |
| | 2.68618 | 4.42225 | 2.77519 | 2.73123 | 3.46354 | 2.40513 | 3.72494 | 3.29354 | 2.67741 | 2.69355 | 4.2469 |
| | 0.0213 | 4.25552 | 4.97786 | 0.61958 | 0.77255 | 0.48576 | 0.9551 | | | | |
| 102 | 2.66189 | 5.14316 | 2.13318 | 2.13532 | 4.472 | 3.10674 | 3.61773 | 3.94939 | 2.17841 | 3.31547 | 4.19091 |
| | 2.68618 | 4.42225 | 2.77519 | 2.73123 | 3.46354 | 2.40513 | 3.72494 | 3.29354 | 2.67741 | 2.69355 | 4.2469 |
| | 0.0213 | 4.25552 | 4.97786 | 0.61958 | 0.77255 | 0.48576 | 0.9551 | | | | |
| 103 | 2.33684 | 3.91895 | 3.56873 | 3.00135 | 2.29386 | 3.60441 | 3.55768 | 2.7882 | 2.83109 | 2.44158 | 3.40552 |
| | 2.68618 | 4.42225 | 2.77519 | 2.73123 | 3.46354 | 2.40513 | 3.72494 | 3.29354 | 2.67741 | 2.69355 | 4.2469 |
| | 0.0213 | 4.25552 | 4.97786 | 0.61958 | 0.77255 | 0.48576 | 0.9551 | | | | |
| 104 | 3.10601 | 0.41162 | 4.68435 | 4.52332 | 4.45138 | 3.63217 | 5.08906 | 3.68031 | 4.36155 | 3.56769 | 4.70691 |
| | 2.68618 | 4.42225 | 2.77519 | 2.73123 | 3.46354 | 2.40513 | 3.72494 | 3.29354 | 2.67741 | 2.69355 | 4.2469 |
| | 0.0213 | 4.25552 | 4.97786 | 0.61958 | 0.77255 | 0.48576 | 0.9551 | | | | |
| 105 | 2.19908 | 4.81464 | 3.03062 | 2.39845 | 3.6726 | 3.30857 | 3.67017 | 3.47442 | 2.37197 | 3.0811 | 3.89602 |
| | 2.68618 | 4.42225 | 2.77519 | 2.73123 | 3.46354 | 2.40513 | 3.72494 | 3.29354 | 2.67741 | 2.69355 | 4.2469 |
| | 0.0213 | 4.25552 | 4.97786 | 0.61958 | 0.77255 | 0.48576 | 0.9551 | | | | |
| 106 | 2.31515 | 5.06582 | 2.54861 | 2.23118 | 4.37887 | 3.41569 | 3.60955 | 3.84293 | 2.30627 | 3.22652 | 4.11559 |
| | 2.68618 | 4.42225 | 2.77519 | 2.73123 | 3.46354 | 2.40513 | 3.72494 | 3.29354 | 2.67741 | 2.69355 | 4.2469 |
| | 0.0213 | 4.25552 | 4.97786 | 0.61958 | 0.77255 | 0.48576 | 0.9551 | | | | |
| 107 | 2.54452 | 4.1425 | 4.05777 | 3.47337 | 2.99581 | 3.75268 | 4.05102 | 2.30514 | 3.18757 | 2.02639 | 2.03451 |
| | 2.68618 | 4.42225 | 2.77519 | 2.73123 | 3.46354 | 2.40513 | 3.72494 | 3.29354 | 2.67741 | 2.69355 | 4.2469 |
| | 0.0213 | 4.25552 | 4.97786 | 0.61958 | 0.77255 | 0.48576 | 0.9551 | | | | |
| 108 | 0.94419 | 4.26429 | 3.70371 | 3.42811 | 4.51236 | 2.74569 | 4.46111 | 3.92542 | 3.4878 | 3.62397 | 4.43848 |
| | 2.68618 | 4.42225 | 2.77519 | 2.73123 | 3.46354 | 2.40513 | 3.72494 | 3.29354 | 2.67741 | 2.69355 | 4.2469 |
| | 0.0213 | 4.25552 | 4.97786 | 0.61958 | 0.77255 | 0.48576 | 0.9551 | | | | |
| 109 | 2.13381 | 4.996 | 2.60313 | 2.33449 | 4.29109 | 3.4252 | 3.63143 | 3.73807 | 2.24504 | 3.28346 | 4.06117 |
| | 2.68618 | 4.42225 | 2.77519 | 2.73123 | 3.46354 | 2.40513 | 3.72494 | 3.29354 | 2.67741 | 2.69355 | 4.2469 |
| | 0.0213 | 4.25552 | 4.97786 | 0.61958 | 0.77255 | 0.48576 | 0.9551 | | | | |
| 110 | 2.34793 | 5.13779 | 2.57319 | 1.98404 | 4.46817 | 3.40727 | 3.06308 | 3.94571 | 2.21015 | 3.43577 | 4.18445 |
| | 2.68618 | 4.42225 | 2.77519 | 2.73123 | 3.46354 | 2.40513 | 3.72494 | 3.29354 | 2.67741 | 2.69355 | 4.2469 |
| | 0.0213 | 4.25552 | 4.97786 | 0.61958 | 0.77255 | 0.48576 | 0.9551 | | | | |
| 111 | 2.4266 | 4.14415 | 4.24471 | 3.66152 | 2.94245 | 3.83706 | 4.16521 | 2.04202 | 3.53512 | 1.63873 | 3.22367 |
| | 2.68618 | 4.42225 | 2.77519 | 2.73123 | 3.46354 | 2.40513 | 3.72494 | 3.29354 | 2.67741 | 2.69355 | 4.2469 |
| | 0.0213 | 4.25552 | 4.97786 | 0.61958 | 0.77255 | 0.48576 | 0.9551 | | | | |
| 112 | 2.6543 | 4.86037 | 2.99217 | 2.41084 | 4.11197 | 3.3 | 3.51798 | 3.52965 | 2.46142 | 2.9452 | 3.94192 |
| | 2.68618 | 4.42225 | 2.77519 | 2.73123 | 3.46354 | 2.40513 | 3.72494 | 3.29354 | 2.67741 | 2.69355 | 4.2469 |
| | 0.0213 | 4.25552 | 4.97786 | 0.61958 | 0.77255 | 0.48576 | 0.9551 | | | | |
| 113 | 1.16524 | 4.29772 | 3.74505 | 3.27702 | 3.94663 | 3.29199 | 4.21077 | 3.09091 | 3.21612 | 2.83092 | 3.88199 |
| | 2.68618 | 4.42225 | 2.77519 | 2.73123 | 3.46354 | 2.40513 | 3.72494 | 3.29354 | 2.67741 | 2.69355 | 4.2469 |
| | 0.0213 | 4.25552 | 4.97786 | 0.61958 | 0.77255 | 0.48576 | 0.9551 | | | | |
| 114 | 3.29166 | 4.54773 | 5.16554 | 4.6417 | 3.57716 | 4.73506 | 5.2389 | 1.24662 | 4.53759 | 1.61105 | 3.35831 |
| | 2.68618 | 4.42225 | 2.77519 | 2.73123 | 3.46354 | 2.40513 | 3.72494 | 3.29354 | 2.67741 | 2.69355 | 4.2469 |
| | 0.0213 | 4.25552 | 4.97786 | 0.61958 | 0.77255 | 0.48576 | 0.9551 | | | | |
| 115 | 3.22756 | 4.52084 | 5.00047 | 4.48885 | 3.67836 | 4.61741 | 5.17302 | 1.67203 | 4.37376 | 2.17264 | 3.20592 |
| | 2.68618 | 4.42225 | 2.77519 | 2.73123 | 3.46354 | 2.40513 | 3.72494 | 3.29354 | 2.67741 | 2.69355 | 4.2469 |
| | 0.0213 | 4.25552 | 4.97786 | 0.61958 | 0.77255 | 0.48576 | 0.9551 | | | | |
| 116 | 2.14283 | 4.32426 | 4.43999 | 3.87926 | 3.22525 | 4.1091 | 4.49504 | 2.0212 | 3.77574 | 1.90406 | 3.34717 |
| | 2.68618 | 4.42225 | 2.77519 | 2.73123 | 3.46354 | 2.40513 | 3.72494 | 3.29354 | 2.67741 | 2.69355 | 4.2469 |
| | 0.0213 | 4.25552 | 4.97786 | 0.61958 | 0.77255 | 0.48576 | 0.9551 | | | | |
| 117 | 2.55096 | 4.46721 | 3.59442 | 3.44696 | 4.49053 | 3.19268 | 4.53558 | 4.07531 | 3.54843 | 3.77096 | 4.67466 |
| | 2.68618 | 4.42225 | 2.77519 | 2.73123 | 3.46354 | 2.40513 | 3.72494 | 3.29354 | 2.67741 | 2.69355 | 4.2469 |
| | 0.0213 | 4.25552 | 4.97786 | 0.61958 | 0.77255 | 0.48576 | 0.9551 | | | | |
| 118 | 2.66485 | 4.31652 | 4.17925 | 3.64964 | 3.49325 | 3.8828 | 4.35877 | 2.25778 | 3.53449 | 1.91036 | 3.41621 |
| | 2.68618 | 4.42225 | 2.77519 | 2.73123 | 3.46354 | 2.40513 | 3.72494 | 3.29354 | 2.67741 | 2.69355 | 4.2469 |
| | 0.0213 | 4.25552 | 4.97786 | 0.61958 | 0.77255 | 0.48576 | 0.9551 | | | | |
| 119 | 2.92591 | 5.47948 | 1.92947 | 1.30203 | 4.7768 | 3.36561 | 3.44454 | 4.2859 | 2.70549 | 3.77178 | 4.5739 |
| | 2.68618 | 4.42225 | 2.77519 | 2.73123 | 3.46354 | 2.40513 | 3.72494 | 3.29354 | 2.67741 | 2.69355 | 4.2469 |
| | 0.0213 | 4.25552 | 4.97786 | 0.61958 | 0.77255 | 0.48576 | 0.9551 | | | | |
| 120 | 3.84785 | 5.17916 | 4.42837 | 4.24429 | 2.41835 | 4.29566 | 3.86875 | 3.81079 | 4.093 | 3.1612 | 4.4472 |
| | 2.68618 | 4.42225 | 2.77519 | 2.73123 | 3.46354 | 2.40513 | 3.72494 | 3.29354 | 2.67741 | 2.69355 | 4.2469 |
| | 0.0213 | 4.25552 | 4.97786 | 0.61958 | 0.77255 | 0.48576 | 0.9551 | | | | |
| 121 | 3.49583 | 5.27252 | 4.0307 | 3.48176 | 4.72839 | 3.88626 | 4.181 | 4.31306 | 2.49598 | 3.75907 | 4.76361 |
| | 2.68618 | 4.42225 | 2.77519 | 2.73123 | 3.46354 | 2.40513 | 3.72494 | 3.29354 | 2.67741 | 2.69355 | 4.2469 |
| | 0.0213 | 4.25552 | 4.97786 | 0.61958 | 0.77255 | 0.48576 | 0.9551 | | | | |
| 122 | 3.05693 | 4.63825 | 4.01003 | 3.65419 | 3.34838 | 3.91996 | 4.36755 | 2.68232 | 3.43279 | 0.82632 | 3.47935 |
| | 2.68618 | 4.42225 | 2.77519 | 2.73123 | 3.46354 | 2.40513 | 3.72494 | 3.29354 | 2.67741 | 2.69355 | 4.2469 |
| | 0.0213 | 4.25552 | 4.97786 | 0.61958 | 0.77255 | 0.48576 | 0.9551 | | | | |
| 123 | 0.78484 | 3.63503 | 4.02275 | 3.66567 | 4.30301 | 3.09883 | 4.51946 | 3.5561 | 3.5848 | 3.3719 | 4.25341 |
| | 2.68618 | 4.42225 | 2.77519 | 2.73123 | 3.46354 | 2.40513 | 3.72494 | 3.29354 | 2.67741 | 2.69355 | 4.2469 |
| | 0.0213 | 4.25552 | 4.97786 | 0.61958 | 0.77255 | 0.48576 | 0.9551 | | | | |
| 124 | 3.34403 | 5.01806 | 3.99464 | 3.90067 | 4.83531 | 3.68485 | 4.93048 | 4.50058 | 3.99508 | 4.07601 | 5.15317 |
| | 2.68618 | 4.42225 | 2.77519 | 2.73123 | 3.46354 | 2.40513 | 3.72494 | 3.29354 | 2.67741 | 2.69355 | 4.2469 |
| | 0.0213 | 4.25552 | 4.97786 | 0.61958 | 0.77255 | 0.48576 | 0.9551 | | | | |
| 125 | 3.01119 | 5.30786 | 2.5308 | 0.89517 | 4.7118 | 3.40936 | 3.95419 | 4.09498 | 2.83177 | 3.71332 | 4.62081 |
| | 2.68618 | 4.42225 | 2.77519 | 2.73123 | 3.46354 | 2.40513 | 3.72494 | 3.29354 | 2.67741 | 2.69355 | 4.2469 |
| | 0.0213 | 4.25552 | 4.97786 | 0.61958 | 0.77255 | 0.48576 | 0.9551 | | | | |
| 126 | 2.87112 | 5.22503 | 2.55133 | 2.38702 | 4.46183 | 3.44072 | 1.60056 | 3.97854 | 2.36584 | 3.50913 | 4.32976 |
| | 2.68618 | 4.42225 | 2.77519 | 2.73123 | 3.46354 | 2.40513 | 3.72494 | 3.29354 | 2.67741 | 2.69355 | 4.2469 |
| | 0.0213 | 4.25552 | 4.97786 | 0.61958 | 0.77255 | 0.48576 | 0.9551 | | | | |
| 127 | 3.3081 | 5.33152 | 3.78728 | 3.07699 | 4.83307 | 3.86274 | 3.77499 | 4.17432 | 1.79447 | 3.59147 | 4.49111 |
| | 2.68618 | 4.42225 | 2.77519 | 2.73123 | 3.46354 | 2.40513 | 3.72494 | 3.29354 | 2.67741 | 2.69355 | 4.2469 |
| | 0.0213 | 4.25552 | 4.97786 | 0.61958 | 0.77255 | 0.48576 | 0.9551 | | | | |
| 128 | 3.6167 | 4.975 | 4.80486 | 4.46322 | 3.33052 | 4.46513 | 5.00174 | 2.57039 | 4.22888 | 0.51488 | 3.26288 |
| | 2.68618 | 4.42225 | 2.77519 | 2.73123 | 3.46354 | 2.40513 | 3.72494 | 3.29354 | 2.67741 | 2.69355 | 4.2469 |
| | 0.0213 | 4.25552 | 4.97786 | 0.61958 | 0.77255 | 0.48576 | 0.9551 | | | | |
| 129 | 3.34403 | 5.01806 | 3.99464 | 3.90067 | 4.83531 | 3.68485 | 4.93048 | 4.50058 | 3.99508 | 4.07601 | 5.15317 |
| | 2.68618 | 4.42225 | 2.77519 | 2.73123 | 3.46354 | 2.40513 | 3.72494 | 3.29354 | 2.67741 | 2.69355 | 4.2469 |
| | 0.0213 | 4.25552 | 4.97786 | 0.61958 | 0.77255 | 0.48576 | 0.9551 | | | | |
| 130 | 0.57778 | 4.43246 | 3.90078 | 3.73115 | 4.4826 | 3.24313 | 4.70044 | 3.66968 | 3.75883 | 3.5317 | 4.534 |
| | 2.68618 | 4.42225 | 2.77519 | 2.73123 | 3.46354 | 2.40513 | 3.72494 | 3.29354 | 2.67741 | 2.69355 | 4.2469 |
| | 0.0213 | 4.25552 | 4.97786 | 0.61958 | 0.77255 | 0.48576 | 0.9551 | | | | |
| 131 | 1.09664 | 4.46203 | 3.48594 | 3.0602 | 3.91557 | 3.39018 | 4.07905 | 3.17677 | 2.95982 | 2.89608 | 3.4621 |
| | 2.68618 | 4.42225 | 2.77519 | 2.73123 | 3.46354 | 2.40513 | 3.72494 | 3.29354 | 2.67741 | 2.69355 | 4.2469 |
| | 0.0213 | 4.25552 | 4.97786 | 0.61958 | 0.77255 | 0.48576 | 0.9551 | | | | |
| 132 | 3.94642 | 5.14309 | 4.81231 | 4.55796 | 1.84154 | 4.60234 | 3.60923 | 3.63287 | 4.39292 | 2.92259 | 4.22715 |
| | 2.68618 | 4.42225 | 2.77519 | 2.73123 | 3.46354 | 2.40513 | 3.72494 | 3.29354 | 2.67741 | 2.69355 | 4.2469 |
| | 0.0213 | 4.25552 | 4.97786 | 0.61958 | 0.77255 | 0.48576 | 0.9551 | | | | |
| 133 | 3.00215 | 5.60916 | 1.37851 | 1.56534 | 4.89385 | 3.35789 | 3.49917 | 4.41969 | 2.78481 | 3.8899 | 4.70611 |
| | 2.68618 | 4.42225 | 2.77519 | 2.73123 | 3.46354 | 2.40513 | 3.72494 | 3.29354 | 2.67741 | 2.69355 | 4.2469 |
| | 0.0213 | 4.25552 | 4.97786 | 0.61958 | 0.77255 | 0.48576 | 0.9551 | | | | |
| 134 | 3.45489 | 5.58801 | 0.49459 | 2.66181 | 5.02904 | 3.55014 | 4.33669 | 4.71613 | 3.50291 | 4.26044 | 5.2638 |
| | 2.68618 | 4.42225 | 2.77519 | 2.73123 | 3.46354 | 2.40513 | 3.72494 | 3.29354 | 2.67741 | 2.69355 | 4.2469 |
| | 0.0213 | 4.25552 | 4.97786 | 0.61958 | 0.77255 | 0.48576 | 0.9551 | | | | |
| 135 | 1.15958 | 3.63692 | 3.8944 | 3.46324 | 4.20666 | 1.97236 | 4.36614 | 3.56413 | 3.41022 | 3.29846 | 4.14315 |
| | 2.68618 | 4.42225 | 2.77519 | 2.73123 | 3.46354 | 2.40513 | 3.72494 | 3.29354 | 2.67741 | 2.69355 | 4.2469 |
| | 0.0213 | 4.25552 | 4.97786 | 0.61958 | 0.77255 | 0.48576 | 0.9551 | | | | |
| 136 | 2.28315 | 4.21242 | 3.75361 | 2.9764 | 3.23681 | 3.66541 | 3.94331 | 2.56676 | 3.10337 | 2.10265 | 2.95782 |
| | 2.68618 | 4.42225 | 2.77519 | 2.73123 | 3.46354 | 2.40513 | 3.72494 | 3.29354 | 2.67741 | 2.69355 | 4.2469 |
| | 0.0213 | 4.25552 | 4.97786 | 0.61958 | 0.77255 | 0.48576 | 0.9551 | | | | |
| 137 | 2.72163 | 5.47373 | 1.79923 | 1.35158 | 4.7792 | 3.36708 | 3.78704 | 4.28314 | 2.68891 | 3.76711 | 4.56605 |
| | 2.68618 | 4.42225 | 2.77519 | 2.73123 | 3.46354 | 2.40513 | 3.72494 | 3.29354 | 2.67741 | 2.69355 | 4.2469 |
| | 0.0213 | 4.25552 | 4.97786 | 0.61958 | 0.77255 | 0.48576 | 0.9551 | | | | |
| 138 | 0.79209 | 4.25149 | 3.78593 | 3.53079 | 4.46614 | 3.06674 | 4.51555 | 3.75432 | 3.54784 | 3.55222 | 4.40622 |
| | 2.68618 | 4.42225 | 2.77519 | 2.73123 | 3.46354 | 2.40513 | 3.72494 | 3.29354 | 2.67741 | 2.69355 | 4.2469 |
| | 0.0213 | 4.25552 | 4.97786 | 0.61958 | 0.77255 | 0.48576 | 0.9551 | | | | |
| 139 | 3.33894 | 4.60488 | 5.16628 | 4.62801 | 3.43382 | 4.73808 | 5.18085 | 1.34876 | 4.51121 | 1.24049 | 3.21303 |
| | 2.68618 | 4.42225 | 2.77519 | 2.73123 | 3.46354 | 2.40513 | 3.72494 | 3.29354 | 2.67741 | 2.69355 | 4.2469 |
| | 0.0213 | 4.25552 | 4.97786 | 0.61958 | 0.77255 | 0.48576 | 0.9551 | | | | |
| 140 | 2.53982 | 4.86299 | 2.93834 | 2.35311 | 4.11108 | 3.45389 | 2.91627 | 3.53257 | 2.23139 | 2.51832 | 3.36704 |
| | 2.68618 | 4.42225 | 2.77519 | 2.73123 | 3.46354 | 2.40513 | 3.72494 | 3.29354 | 2.67741 | 2.69355 | 4.2469 |
| | 0.0213 | 4.25552 | 4.97786 | 0.61958 | 0.77255 | 0.48576 | 0.9551 | | | | |
| 141 | 3.14158 | 3.9883 | 4.43671 | 3.94113 | 2.43765 | 4.10081 | 3.88801 | 2.89559 | 3.74377 | 2.29885 | 3.57298 |
| | 2.68618 | 4.42225 | 2.77519 | 2.73123 | 3.46354 | 2.40513 | 3.72494 | 3.29354 | 2.67741 | 2.69355 | 4.2469 |
| | 0.0213 | 4.25552 | 4.97786 | 0.61958 | 0.77255 | 0.48576 | 0.9551 | | | | |
| 142 | 2.6268 | 4.42605 | 4.89134 | 4.36111 | 3.66987 | 4.48221 | 4.98904 | 1.32971 | 4.25959 | 2.08651 | 3.49478 |
| | 2.68618 | 4.42225 | 2.77519 | 2.73123 | 3.46354 | 2.40513 | 3.72494 | 3.29354 | 2.67741 | 2.69355 | 4.2469 |
| | 0.0213 | 4.25552 | 4.97786 | 0.61958 | 0.77255 | 0.48576 | 0.9551 | | | | |
| 143 | 3.25241 | 5.39101 | 3.71565 | 2.95953 | 4.91102 | 3.84901 | 3.70354 | 4.22048 | 1.39736 | 3.60124 | 4.46615 |
| | 2.68618 | 4.42225 | 2.77519 | 2.73123 | 3.46354 | 2.40513 | 3.72494 | 3.29354 | 2.67741 | 2.69355 | 4.2469 |
| | 0.0213 | 4.25552 | 4.97786 | 0.61958 | 0.77255 | 0.48576 | 0.9551 | | | | |
| 144 | 2.609 | 5.15173 | 2.2255 | 2.1938 | 4.4729 | 3.40238 | 3.63574 | 3.94845 | 2.31029 | 3.44779 | 4.2053 |
| | 2.68618 | 4.42225 | 2.77519 | 2.73123 | 3.46354 | 2.40513 | 3.72494 | 3.29354 | 2.67741 | 2.69355 | 4.2469 |
| | 0.0213 | 4.25552 | 4.97786 | 0.61958 | 0.77255 | 0.48576 | 0.9551 | | | | |
| 145 | 2.65663 | 5.02967 | 2.89993 | 2.27601 | 4.32765 | 3.06402 | 3.26627 | 3.60889 | 2.38934 | 3.31486 | 4.09139 |
| | 2.68618 | 4.42225 | 2.77519 | 2.73123 | 3.46354 | 2.40513 | 3.72494 | 3.29354 | 2.67741 | 2.69355 | 4.2469 |
| | 0.20749 | 4.25552 | 1.75337 | 0.61958 | 0.77255 | 0.48576 | 0.9551 | | | | |
| 146 | 1.81814 | 4.2716 | 3.53266 | 2.9675 | 3.38925 | 3.56426 | 3.84427 | 2.73772 | 2.88407 | 2.44525 | 3.18321 |
| | 2.68618 | 4.42225 | 2.77519 | 2.73123 | 3.46354 | 2.40513 | 3.72494 | 3.29354 | 2.67741 | 2.69355 | 4.2469 |
| | 0.06346 | 4.07363 | 3.11296 | 0.61958 | 0.77255 | 0.68685 | 0.69948 | | | | |
| 147 | 2.25203 | 4.55727 | 2.93689 | 2.5659 | 3.74719 | 3.45084 | 3.67538 | 3.13232 | 2.54399 | 2.49491 | 3.18094 |
| | 2.68601 | 4.4222 | 2.7748 | 2.73117 | 3.46379 | 2.40501 | 3.72519 | 3.2933 | 2.6776 | 2.6938 | 4.24686 |
| | 0.53954 | 0.89548 | 4.7591 | 1.2896 | 0.32211 | 0.36328 | 1.18872 | | | | |
| 148 | 2.65415 | 3.18473 | 2.60629 | 2.32833 | 4.19207 | 2.21188 | 3.68897 | 3.62047 | 2.40697 | 3.20657 | 4.01202 |
| | 2.68618 | 4.42225 | 2.77519 | 2.73123 | 3.46354 | 2.40513 | 3.72494 | 3.29354 | 2.67741 | 2.69355 | 4.2469 |
| | 0.0213 | 4.25552 | 4.97786 | 0.61958 | 0.77255 | 0.48576 | 0.9551 | | | | |
| 149 | 2.95227 | 5.5143 | 1.51524 | 1.48816 | 4.81612 | 3.37033 | 3.80443 | 4.32435 | 2.7102 | 3.80498 | 4.61201 |
| | 2.68618 | 4.42225 | 2.77519 | 2.73123 | 3.46354 | 2.40513 | 3.72494 | 3.29354 | 2.67741 | 2.69355 | 4.2469 |
| | 0.0213 | 4.25552 | 4.97786 | 0.61958 | 0.77255 | 0.48576 | 0.9551 | | | | |
| 150 | 2.64631 | 5.20955 | 2.41236 | 1.91823 | 4.52272 | 3.39858 | 3.67522 | 3.99815 | 2.37496 | 3.50144 | 4.2719 |
| | 2.68618 | 4.42225 | 2.77519 | 2.73123 | 3.46354 | 2.40513 | 3.72494 | 3.29354 | 2.67741 | 2.69355 | 4.2469 |
| | 0.0213 | 4.25552 | 4.97786 | 0.61958 | 0.77255 | 0.48576 | 0.9551 | | | | |
| 151 | 3.2118 | 4.72114 | 4.38042 | 3.9584 | 2.73383 | 4.02996 | 4.03427 | 3.0267 | 3.65069 | 2.50896 | 3.74225 |
| | 2.68618 | 4.42225 | 2.77519 | 2.73123 | 3.46354 | 2.40513 | 3.72494 | 3.29354 | 2.67741 | 2.69355 | 4.2469 |
| | 0.06553 | 4.25552 | 3.01102 | 0.61958 | 0.77255 | 0.48576 | 0.9551 | | | | |
| 152 | 3.35631 | 4.65203 | 5.06637 | 4.50452 | 3.00735 | 4.66836 | 4.99974 | 1.87686 | 4.38618 | 0.91426 | 3.01592 |
| | 2.68618 | 4.42225 | 2.77519 | 2.73123 | 3.46354 | 2.40513 | 3.72494 | 3.29354 | 2.67741 | 2.69355 | 4.2469 |
| | 0.02225 | 4.21224 | 4.93459 | 0.61958 | 0.77255 | 0.54094 | 0.87276 | | | | |
| 153 | 2.57213 | 5.02638 | 2.98342 | 2.34543 | 4.3417 | 3.45414 | 3.62375 | 3.77932 | 1.801 | 3.30831 | 4.09133 |
| | 2.68618 | 4.42225 | 2.77519 | 2.73123 | 3.46354 | 2.40513 | 3.72494 | 3.29354 | 2.67741 | 2.69355 | 4.2469 |
| | 0.02225 | 4.21224 | 4.93459 | 0.61958 | 0.77255 | 0.54094 | 0.87276 | | | | |
| 154 | 2.62432 | 5.28573 | 2.00127 | 1.76343 | 4.60388 | 3.37014 | 3.6823 | 4.09412 | 2.37067 | 3.57989 | 4.34911 |
| | 2.68618 | 4.42225 | 2.77519 | 2.73123 | 3.46354 | 2.40513 | 3.72494 | 3.29354 | 2.67741 | 2.69355 | 4.2469 |
| | 0.02225 | 4.21224 | 4.93459 | 0.61958 | 0.77255 | 0.54094 | 0.87276 | | | | |
| 155 | 2.81824 | 4.46049 | 3.7236 | 3.17906 | 2.60538 | 3.46919 | 2.83604 | 2.9695 | 3.09007 | 2.34936 | 3.57361 |
| | 2.68618 | 4.42225 | 2.77519 | 2.73123 | 3.46354 | 2.40513 | 3.72494 | 3.29354 | 2.67741 | 2.69355 | 4.2469 |
| | 0.02225 | 4.21224 | 4.93459 | 0.61958 | 0.77255 | 0.54094 | 0.87276 | | | | |
| 156 | 1.47609 | 4.28772 | 3.67705 | 3.2009 | 3.82281 | 2.50801 | 4.13442 | 2.97689 | 3.15373 | 2.71017 | 3.76755 |
| | 2.68618 | 4.42225 | 2.77519 | 2.73123 | 3.46354 | 2.40513 | 3.72494 | 3.29354 | 2.67741 | 2.69355 | 4.2469 |
| | 0.02225 | 4.21224 | 4.93459 | 0.61958 | 0.77255 | 0.54094 | 0.87276 | | | | |
| 157 | 3.39607 | 5.53382 | 0.53169 | 2.61585 | 4.96615 | 3.50591 | 4.28354 | 4.64066 | 3.43962 | 4.19216 | 5.19108 |
| | 2.68618 | 4.42225 | 2.77519 | 2.73123 | 3.46354 | 2.40513 | 3.72494 | 3.29354 | 2.67741 | 2.69355 | 4.2469 |
| | 0.02225 | 4.21224 | 4.93459 | 0.61958 | 0.77255 | 0.54094 | 0.87276 | | | | |
| 158 | 2.59342 | 4.18619 | 4.09052 | 3.51858 | 1.90243 | 3.78729 | 4.00775 | 2.55852 | 3.40225 | 1.86364 | 3.22649 |
| | 2.68618 | 4.42225 | 2.77519 | 2.73123 | 3.46354 | 2.40513 | 3.72494 | 3.29354 | 2.67741 | 2.69355 | 4.2469 |
| | 0.02225 | 4.21224 | 4.93459 | 0.61958 | 0.77255 | 0.54094 | 0.87276 | | | | |
| 159 | 2.49675 | 4.49787 | 3.13901 | 2.95607 | 4.43779 | 3.14537 | 4.20364 | 3.98887 | 3.13126 | 3.63856 | 4.47861 |
| | 2.68618 | 4.42225 | 2.77519 | 2.73123 | 3.46354 | 2.40513 | 3.72494 | 3.29354 | 2.67741 | 2.69355 | 4.2469 |
| | 0.02225 | 4.21224 | 4.93459 | 0.61958 | 0.77255 | 0.54094 | 0.87276 | | | | |
| 160 | 2.8841 | 5.20295 | 3.14784 | 2.51492 | 4.59649 | 3.57921 | 3.64956 | 4.00008 | 1.65277 | 3.46379 | 4.2695 |
| | 2.68618 | 4.42225 | 2.77519 | 2.73123 | 3.46354 | 2.40513 | 3.72494 | 3.29354 | 2.67741 | 2.69355 | 4.2469 |
| | 0.02225 | 4.21224 | 4.93459 | 0.61958 | 0.77255 | 0.54094 | 0.87276 | | | | |
| 161 | 2.6219 | 1.93898 | 4.27871 | 3.76034 | 3.51947 | 3.62944 | 4.35392 | 2.36237 | 3.62209 | 2.39602 | 3.48141 |
| | 2.68618 | 4.42225 | 2.77519 | 2.73123 | 3.46354 | 2.40513 | 3.72494 | 3.29354 | 2.67741 | 2.69355 | 4.2469 |
| | 0.02225 | 4.21224 | 4.93459 | 0.61958 | 0.77255 | 0.45274 | 1.01028 | | | | |
| 162 | 3.62928 | 4.89339 | 4.80118 | 4.44183 | 0.97228 | 4.47872 | 3.68242 | 3.26598 | 4.27962 | 2.65017 | 3.8916 |
| | 2.68618 | 4.42225 | 2.77519 | 2.73123 | 3.46354 | 2.40513 | 3.72494 | 3.29354 | 2.67741 | 2.69355 | 4.2469 |
| | 0.0213 | 4.25552 | 4.97786 | 0.61958 | 0.77255 | 0.48576 | 0.9551 | | | | |
| 163 | 3.38998 | 4.66903 | 5.16045 | 4.59769 | 3.27725 | 4.73483 | 5.09818 | 1.68059 | 4.47497 | 0.96503 | 2.80972 |
| | 2.68618 | 4.42225 | 2.77519 | 2.73123 | 3.46354 | 2.40513 | 3.72494 | 3.29354 | 2.67741 | 2.69355 | 4.2469 |
| | 0.0213 | 4.25552 | 4.97786 | 0.61958 | 0.77255 | 0.48576 | 0.9551 | | | | |
| 164 | 2.87451 | 3.82956 | 4.3442 | 3.76954 | 3.20791 | 3.99597 | 4.30617 | 2.22984 | 3.62126 | 1.98337 | 1.40906 |
| | 2.68618 | 4.42225 | 2.77519 | 2.73123 | 3.46354 | 2.40513 | 3.72494 | 3.29354 | 2.67741 | 2.69355 | 4.2469 |
| | 0.0213 | 4.25552 | 4.97786 | 0.61958 | 0.77255 | 0.48576 | 0.9551 | | | | |
| 165 | 3.21325 | 4.93276 | 3.96373 | 3.91957 | 5.02096 | 0.32494 | 4.99846 | 4.73153 | 4.15183 | 4.33001 | 5.32112 |
| | 2.68618 | 4.42225 | 2.77519 | 2.73123 | 3.46354 | 2.40513 | 3.72494 | 3.29354 | 2.67741 | 2.69355 | 4.2469 |
| | 0.0213 | 4.25552 | 4.97786 | 0.61958 | 0.77255 | 0.48576 | 0.9551 | | | | |
| 166 | 2.599 | 3.61046 | 3.07338 | 2.69714 | 3.77099 | 3.18004 | 3.77854 | 3.05056 | 2.67549 | 2.82596 | 3.3173 |
| | 2.68618 | 4.42225 | 2.77519 | 2.73123 | 3.46354 | 2.40513 | 3.72494 | 3.29354 | 2.67741 | 2.69355 | 4.2469 |
| | 0.0213 | 4.25552 | 4.97786 | 0.61958 | 0.77255 | 0.48576 | 0.9551 | | | | |
| 167 | 2.73773 | 4.90439 | 2.63189 | 2.52675 | 4.27273 | 3.36026 | 3.2046 | 3.83506 | 2.74112 | 3.42567 | 4.26347 |
| | 2.68618 | 4.42225 | 2.77519 | 2.73123 | 3.46354 | 2.40513 | 3.72494 | 3.29354 | 2.67741 | 2.69355 | 4.2469 |
| | 0.0213 | 4.25552 | 4.97786 | 0.61958 | 0.77255 | 0.48576 | 0.9551 | | | | |
| 168 | 1.1864 | 4.42374 | 3.36272 | 3.00088 | 4.34072 | 3.17173 | 4.14428 | 3.74875 | 3.06264 | 3.41264 | 4.23486 |
| | 2.68618 | 4.42225 | 2.77519 | 2.73123 | 3.46354 | 2.40513 | 3.72494 | 3.29354 | 2.67741 | 2.69355 | 4.2469 |
| | 0.0213 | 4.25552 | 4.97786 | 0.61958 | 0.77255 | 0.48576 | 0.9551 | | | | |
| 169 | 3.21325 | 4.93276 | 3.96373 | 3.91957 | 5.02096 | 0.32494 | 4.99846 | 4.73153 | 4.15183 | 4.33001 | 5.32112 |
| | 2.68618 | 4.42225 | 2.77519 | 2.73123 | 3.46354 | 2.40513 | 3.72494 | 3.29354 | 2.67741 | 2.69355 | 4.2469 |
| | 0.0213 | 4.25552 | 4.97786 | 0.61958 | 0.77255 | 0.48576 | 0.9551 | | | | |
| 170 | 1.42474 | 4.31808 | 3.64137 | 3.4459 | 4.60884 | 1.14769 | 4.5307 | 4.00013 | 3.57302 | 3.7257 | 4.55933 |
| | 2.68618 | 4.42225 | 2.77519 | 2.73123 | 3.46354 | 2.40513 | 3.72494 | 3.29354 | 2.67741 | 2.69355 | 4.2469 |
| | 0.0213 | 4.25552 | 4.97786 | 0.61958 | 0.77255 | 0.48576 | 0.9551 | | | | |
| 171 | 2.67644 | 4.75042 | 2.92595 | 2.72735 | 4.45964 | 3.28645 | 4.05372 | 3.89194 | 2.9131 | 3.56299 | 4.42685 |
| | 2.68618 | 4.42225 | 2.77519 | 2.73123 | 3.46354 | 2.40513 | 3.72494 | 3.29354 | 2.67741 | 2.69355 | 4.2469 |
| | 0.0213 | 4.25552 | 4.97786 | 0.61958 | 0.77255 | 0.48576 | 0.9551 | | | | |
| 172 | 3.36706 | 4.64594 | 5.13029 | 4.57809 | 3.33733 | 4.72482 | 5.10688 | 1.07176 | 4.44057 | 1.46644 | 2.60671 |
| | 2.68618 | 4.42225 | 2.77519 | 2.73123 | 3.46354 | 2.40513 | 3.72494 | 3.29354 | 2.67741 | 2.69355 | 4.2469 |
| | 0.0213 | 4.25552 | 4.97786 | 0.61958 | 0.77255 | 0.48576 | 0.9551 | | | | |
| 173 | 1.21161 | 4.2581 | 3.83859 | 3.39579 | 3.97834 | 3.25475 | 4.29246 | 3.10257 | 3.34173 | 3.01087 | 3.91839 |
| | 2.68618 | 4.42225 | 2.77519 | 2.73123 | 3.46354 | 2.40513 | 3.72494 | 3.29354 | 2.67741 | 2.69355 | 4.2469 |
| | 0.0213 | 4.25552 | 4.97786 | 0.61958 | 0.77255 | 0.48576 | 0.9551 | | | | |
| 174 | 3.7362 | 4.96075 | 4.86903 | 4.53057 | 1.47683 | 4.55341 | 3.65638 | 3.34755 | 4.35966 | 2.21297 | 3.94457 |
| | 2.68618 | 4.42225 | 2.77519 | 2.73123 | 3.46354 | 2.40513 | 3.72494 | 3.29354 | 2.67741 | 2.69355 | 4.2469 |
| | 0.0213 | 4.25552 | 4.97786 | 0.61958 | 0.77255 | 0.48576 | 0.9551 | | | | |
| 175 | 2.6582 | 4.88376 | 3.02439 | 2.47396 | 3.34774 | 3.47113 | 2.5466 | 3.55648 | 2.43588 | 3.14092 | 3.95352 |
| | 2.68618 | 4.42225 | 2.77519 | 2.73123 | 3.46354 | 2.40513 | 3.72494 | 3.29354 | 2.67741 | 2.69355 | 4.2469 |
| | 0.0213 | 4.25552 | 4.97786 | 0.61958 | 0.77255 | 0.48576 | 0.9551 | | | | |
| 176 | 1.68939 | 4.30246 | 3.97245 | 3.4616 | 3.68491 | 3.6115 | 4.28948 | 2.46435 | 3.38214 | 2.48409 | 3.61002 |
| | 2.68618 | 4.42225 | 2.77519 | 2.73123 | 3.46354 | 2.40513 | 3.72494 | 3.29354 | 2.67741 | 2.69355 | 4.2469 |
| | 0.0213 | 4.25552 | 4.97786 | 0.61958 | 0.77255 | 0.48576 | 0.9551 | | | | |
| 177 | 1.47593 | 4.35612 | 3.42796 | 3.17287 | 4.52111 | 1.38586 | 4.32882 | 3.95721 | 3.31242 | 3.62019 | 4.43073 |
| | 2.68618 | 4.42225 | 2.77519 | 2.73123 | 3.46354 | 2.40513 | 3.72494 | 3.29354 | 2.67741 | 2.69355 | 4.2469 |
| | 0.0213 | 4.25552 | 4.97786 | 0.61958 | 0.77255 | 0.48576 | 0.9551 | | | | |
| 178 | 3.51212 | 4.80626 | 5.15544 | 4.58484 | 3.17208 | 4.80452 | 5.10508 | 2.16226 | 4.44142 | 0.73151 | 2.49265 |
| | 2.68618 | 4.42225 | 2.77519 | 2.73123 | 3.46354 | 2.40513 | 3.72494 | 3.29354 | 2.67741 | 2.69355 | 4.2469 |
| | 0.0213 | 4.25552 | 4.97786 | 0.61958 | 0.77255 | 0.48576 | 0.9551 | | | | |
| 179 | 2.53136 | 4.85113 | 3.15726 | 2.57206 | 4.09761 | 3.5279 | 3.47496 | 3.49952 | 2.26118 | 2.98281 | 3.59713 |
| | 2.68618 | 4.42225 | 2.77519 | 2.73123 | 3.46354 | 2.40513 | 3.72494 | 3.29354 | 2.67741 | 2.69355 | 4.2469 |
| | 0.0213 | 4.25552 | 4.97786 | 0.61958 | 0.77255 | 0.48576 | 0.9551 | | | | |
| 180 | 1.55978 | 4.30143 | 3.68081 | 3.15647 | 3.69725 | 3.43196 | 4.06403 | 2.89411 | 3.09857 | 2.73744 | 3.38369 |
| | 2.68618 | 4.42225 | 2.77519 | 2.73123 | 3.46354 | 2.40513 | 3.72494 | 3.29354 | 2.67741 | 2.69355 | 4.2469 |
| | 0.0213 | 4.25552 | 4.97786 | 0.61958 | 0.77255 | 0.48576 | 0.9551 | | | | |
| 181 | 1.92279 | 3.87083 | 3.73426 | 3.17374 | 3.41056 | 3.31117 | 3.96755 | 2.72845 | 3.09618 | 1.82663 | 3.39405 |
| | 2.68618 | 4.42225 | 2.77519 | 2.73123 | 3.46354 | 2.40513 | 3.72494 | 3.29354 | 2.67741 | 2.69355 | 4.2469 |
| | 0.0213 | 4.25552 | 4.97786 | 0.61958 | 0.77255 | 0.48576 | 0.9551 | | | | |
| 182 | 2.60049 | 5.08818 | 2.06666 | 2.0011 | 4.39685 | 3.21005 | 3.63204 | 3.85978 | 2.39913 | 3.25905 | 3.71619 |
| | 2.68618 | 4.42225 | 2.77519 | 2.73123 | 3.46354 | 2.40513 | 3.72494 | 3.29354 | 2.67741 | 2.69355 | 4.2469 |
| | 0.0213 | 4.25552 | 4.97786 | 0.61958 | 0.77255 | 0.48576 | 0.9551 | | | | |
| 183 | 2.22137 | 4.44866 | 3.19998 | 2.7811 | 3.605 | 3.55543 | 3.24533 | 2.78385 | 2.74656 | 2.14455 | 3.54717 |
| | 2.68614 | 4.42231 | 2.77504 | 2.73122 | 3.4636 | 2.40512 | 3.72481 | 3.2936 | 2.67747 | 2.69361 | 4.24696 |
| | 0.2552 | 1.7373 | 3.01102 | 0.66958 | 0.71729 | 0.48576 | 0.9551 | | | | |
| 184 | 3.07385 | 5.68653 | 1.03444 | 1.94309 | 4.9656 | 3.32234 | 3.87645 | 4.49781 | 2.91082 | 3.98007 | 4.83283 |
| | 2.68618 | 4.42225 | 2.77519 | 2.73123 | 3.46354 | 2.40513 | 3.72494 | 3.29354 | 2.67741 | 2.69355 | 4.2469 |
| | 0.02225 | 4.21224 | 4.93459 | 0.61958 | 0.77255 | 0.54094 | 0.87276 | | | | |
| 185 | 3.04101 | 4.43494 | 4.58213 | 4.00585 | 2.96286 | 4.23225 | 4.55171 | 2.17464 | 3.88822 | 1.07497 | 2.89473 |
| | 2.68618 | 4.42225 | 2.77519 | 2.73123 | 3.46354 | 2.40513 | 3.72494 | 3.29354 | 2.67741 | 2.69355 | 4.2469 |
| | 0.02225 | 4.21224 | 4.93459 | 0.61958 | 0.77255 | 0.54094 | 0.87276 | | | | |
| 186 | 2.69084 | 5.16486 | 2.48287 | 1.97237 | 4.48364 | 2.92995 | 3.43767 | 3.9601 | 2.21919 | 3.45956 | 4.22139 |
| | 2.68618 | 4.42225 | 2.77519 | 2.73123 | 3.46354 | 2.40513 | 3.72494 | 3.29354 | 2.67741 | 2.69355 | 4.2469 |
| | 0.02225 | 4.21224 | 4.93459 | 0.61958 | 0.77255 | 0.45274 | 1.01028 | | | | |
| 187 | 2.37009 | 4.63835 | 3.06685 | 2.7739 | 4.37155 | 2.81692 | 4.01156 | 3.78019 | 2.60484 | 3.41563 | 4.2528 |
| | 2.68618 | 4.42225 | 2.77519 | 2.73123 | 3.46354 | 2.40513 | 3.72494 | 3.29354 | 2.67741 | 2.69355 | 4.2469 |
| | 0.0213 | 4.25552 | 4.97786 | 0.61958 | 0.77255 | 0.48576 | 0.9551 | | | | |
| 188 | 2.8598 | 4.42464 | 4.84922 | 4.27933 | 3.33456 | 4.37237 | 4.74656 | 1.70815 | 4.14979 | 1.40021 | 2.51879 |
| | 2.68618 | 4.42225 | 2.77519 | 2.73123 | 3.46354 | 2.40513 | 3.72494 | 3.29354 | 2.67741 | 2.69355 | 4.2469 |
| | 0.05262 | 4.25552 | 3.29484 | 0.61958 | 0.77255 | 0.48576 | 0.9551 | | | | |
| 189 | 2.679 | 4.4764 | 3.02533 | 2.26362 | 4.27448 | 3.47031 | 3.63103 | 3.44239 | 1.70468 | 3.10517 | 4.04335 |
| | 2.68618 | 4.42225 | 2.77519 | 2.73123 | 3.46354 | 2.40513 | 3.72494 | 3.29354 | 2.67741 | 2.69355 | 4.2469 |
| | 0.02197 | 4.22487 | 4.94721 | 0.61958 | 0.77255 | 0.46175 | 0.99473 | | | | |
| 190 | 3.3305 | 4.59281 | 5.1498 | 4.63453 | 3.55994 | 4.75878 | 5.26513 | 0.946 | 4.51485 | 1.73726 | 3.34238 |
| | 2.68618 | 4.42225 | 2.77519 | 2.73123 | 3.46354 | 2.40513 | 3.72494 | 3.29354 | 2.67741 | 2.69355 | 4.2469 |
| | 0.0213 | 4.25552 | 4.97786 | 0.61958 | 0.77255 | 0.48576 | 0.9551 | | | | |
| 191 | 2.50701 | 4.89444 | 2.89753 | 2.44443 | 4.15319 | 3.45239 | 3.64741 | 3.05723 | 2.2654 | 3.05665 | 3.96092 |
| | 2.68618 | 4.42225 | 2.77519 | 2.73123 | 3.46354 | 2.40513 | 3.72494 | 3.29354 | 2.67741 | 2.69355 | 4.2469 |
| | 0.0213 | 4.25552 | 4.97786 | 0.61958 | 0.77255 | 0.48576 | 0.9551 | | | | |
| 192 | 3.21325 | 4.93276 | 3.96373 | 3.91957 | 5.02096 | 0.32494 | 4.99846 | 4.73153 | 4.15183 | 4.33001 | 5.32112 |
| | 2.68618 | 4.42225 | 2.77519 | 2.73123 | 3.46354 | 2.40513 | 3.72494 | 3.29354 | 2.67741 | 2.69355 | 4.2469 |
| | 0.0213 | 4.25552 | 4.97786 | 0.61958 | 0.77255 | 0.48576 | 0.9551 | | | | |
| 193 | 3.12638 | 3.86135 | 4.81627 | 4.2433 | 3.27324 | 4.37152 | 4.72982 | 2.0895 | 4.11109 | 1.0071 | 2.82613 |
| | 2.68618 | 4.42225 | 2.77519 | 2.73123 | 3.46354 | 2.40513 | 3.72494 | 3.29354 | 2.67741 | 2.69355 | 4.2469 |
| | 0.0213 | 4.25552 | 4.97786 | 0.61958 | 0.77255 | 0.48576 | 0.9551 | | | | |
| 194 | 3.0038 | 4.36972 | 4.66061 | 4.12512 | 3.58144 | 3.67296 | 4.73573 | 1.13957 | 4.00155 | 2.18188 | 3.45746 |
| | 2.68618 | 4.42225 | 2.77519 | 2.73123 | 3.46354 | 2.40513 | 3.72494 | 3.29354 | 2.67741 | 2.69355 | 4.2469 |
| | 0.0213 | 4.25552 | 4.97786 | 0.61958 | 0.77255 | 0.48576 | 0.9551 | | | | |
| 195 | 3.52178 | 4.80496 | 5.21863 | 4.63827 | 2.89178 | 4.81139 | 5.07413 | 2.12954 | 4.51017 | 0.79194 | 2.14929 |
| | 2.68618 | 4.42225 | 2.77519 | 2.73123 | 3.46354 | 2.40513 | 3.72494 | 3.29354 | 2.67741 | 2.69355 | 4.2469 |
| | 0.0213 | 4.25552 | 4.97786 | 0.61958 | 0.77255 | 0.48576 | 0.9551 | | | | |
| 196 | 2.65124 | 4.97391 | 2.76308 | 2.40569 | 4.23984 | 3.43825 | 2.85334 | 3.21521 | 2.40605 | 3.24722 | 4.03573 |
| | 2.68618 | 4.42225 | 2.77519 | 2.73123 | 3.46354 | 2.40513 | 3.72494 | 3.29354 | 2.67741 | 2.69355 | 4.2469 |
| | 0.0213 | 4.25552 | 4.97786 | 0.61958 | 0.77255 | 0.48576 | 0.9551 | | | | |
| 197 | 2.63916 | 4.89772 | 3.08076 | 2.56258 | 4.09886 | 3.51087 | 3.07763 | 3.37711 | 2.40665 | 3.14796 | 3.9932 |
| | 2.68618 | 4.42225 | 2.77519 | 2.73123 | 3.46354 | 2.40513 | 3.72494 | 3.29354 | 2.67741 | 2.69355 | 4.2469 |
| | 0.0213 | 4.25552 | 4.97786 | 0.61958 | 0.77255 | 0.48576 | 0.9551 | | | | |
| 198 | 2.42207 | 4.46056 | 3.52606 | 3.21767 | 4.11878 | 3.29998 | 4.27039 | 3.06106 | 3.17028 | 3.10701 | 4.11363 |
| | 2.68618 | 4.42225 | 2.77519 | 2.73123 | 3.46354 | 2.40513 | 3.72494 | 3.29354 | 2.67741 | 2.69355 | 4.2469 |
| | 0.0213 | 4.25552 | 4.97786 | 0.61958 | 0.77255 | 0.48576 | 0.9551 | | | | |
| 199 | 3.02795 | 4.47618 | 4.25522 | 3.73944 | 1.39929 | 4.01864 | 3.12192 | 2.96004 | 3.61816 | 2.457 | 3.26936 |
| | 2.68618 | 4.42225 | 2.77519 | 2.73123 | 3.46354 | 2.40513 | 3.72494 | 3.29354 | 2.67741 | 2.69355 | 4.2469 |
| | 0.0213 | 4.25552 | 4.97786 | 0.61958 | 0.77255 | 0.48576 | 0.9551 | | | | |
| 200 | 3.58253 | 4.88367 | 4.91148 | 4.50196 | 0.97239 | 4.57554 | 4.18077 | 2.69128 | 4.33385 | 1.60163 | 3.3383 |
| | 2.68618 | 4.42225 | 2.77519 | 2.73123 | 3.46354 | 2.40513 | 3.72494 | 3.29354 | 2.67741 | 2.69355 | 4.2469 |
| | 0.0213 | 4.25552 | 4.97786 | 0.61958 | 0.77255 | 0.48576 | 0.9551 | | | | |
| 201 | 2.36072 | 4.3236 | 3.51036 | 3.28723 | 4.60346 | 1.11963 | 4.42077 | 4.04762 | 3.41991 | 3.71756 | 4.52365 |
| | 2.68618 | 4.42225 | 2.77519 | 2.73123 | 3.46354 | 2.40513 | 3.72494 | 3.29354 | 2.67741 | 2.69355 | 4.2469 |
| | 0.0213 | 4.25552 | 4.97786 | 0.61958 | 0.77255 | 0.48576 | 0.9551 | | | | |
| 202 | 2.39294 | 4.48907 | 3.5425 | 3.45586 | 4.72578 | 0.65686 | 4.62656 | 4.18515 | 3.67885 | 3.9002 | 4.78688 |
| | 2.68618 | 4.42225 | 2.77519 | 2.73123 | 3.46354 | 2.40513 | 3.72494 | 3.29354 | 2.67741 | 2.69355 | 4.2469 |
| | 0.0213 | 4.25552 | 4.97786 | 0.61958 | 0.77255 | 0.48576 | 0.9551 | | | | |
| 203 | 2.46696 | 4.3893 | 3.43591 | 2.57615 | 3.54102 | 3.58601 | 3.83757 | 2.77171 | 2.72898 | 2.50837 | 3.3286 |
| | 2.68618 | 4.42225 | 2.77519 | 2.73123 | 3.46354 | 2.40513 | 3.72494 | 3.29354 | 2.67741 | 2.69355 | 4.2469 |
| | 0.0213 | 4.25552 | 4.97786 | 0.61958 | 0.77255 | 0.48576 | 0.9551 | | | | |
| 204 | 2.51844 | 5.16458 | 2.57081 | 1.77211 | 4.49008 | 3.40716 | 3.08068 | 3.9664 | 2.14849 | 3.45936 | 4.2153 |
| | 2.68618 | 4.42225 | 2.77519 | 2.73123 | 3.46354 | 2.40513 | 3.72494 | 3.29354 | 2.67741 | 2.69355 | 4.2469 |
| | 0.0213 | 4.25552 | 4.97786 | 0.61958 | 0.77255 | 0.48576 | 0.9551 | | | | |
| 205 | 2.96185 | 5.12312 | 3.2279 | 2.53337 | 4.55724 | 3.61344 | 3.74682 | 3.94072 | 2.1849 | 3.4487 | 4.2943 |
| | 2.68618 | 4.42225 | 2.77519 | 2.73123 | 3.46354 | 2.40513 | 3.72494 | 3.29354 | 2.67741 | 2.69355 | 4.2469 |
| | 0.0213 | 4.25552 | 4.97786 | 0.61958 | 0.77255 | 0.48576 | 0.9551 | | | | |
| 206 | 2.45604 | 3.85306 | 3.70865 | 3.21226 | 3.90372 | 3.28954 | 4.14552 | 2.91497 | 3.14302 | 2.96121 | 3.85001 |
| | 2.68618 | 4.42225 | 2.77519 | 2.73123 | 3.46354 | 2.40513 | 3.72494 | 3.29354 | 2.67741 | 2.69355 | 4.2469 |
| | 0.0213 | 4.25552 | 4.97786 | 0.61958 | 0.77255 | 0.48576 | 0.9551 | | | | |
| 207 | 2.49946 | 5.15602 | 2.56064 | 1.83876 | 4.48321 | 3.04861 | 3.62648 | 3.96107 | 2.26932 | 3.45302 | 4.20576 |
| | 2.68618 | 4.42225 | 2.77519 | 2.73123 | 3.46354 | 2.40513 | 3.72494 | 3.29354 | 2.67741 | 2.69355 | 4.2469 |
| | 0.0213 | 4.25552 | 4.97786 | 0.61958 | 0.77255 | 0.48576 | 0.9551 | | | | |
| 208 | 1.90602 | 4.30156 | 3.63579 | 3.40197 | 4.54129 | 3.06744 | 4.46933 | 3.93437 | 3.47177 | 3.663 | 4.49961 |
| | 2.68618 | 4.42225 | 2.77519 | 2.73123 | 3.46354 | 2.40513 | 3.72494 | 3.29354 | 2.67741 | 2.69355 | 4.2469 |
| | 0.0213 | 4.25552 | 4.97786 | 0.61958 | 0.77255 | 0.48576 | 0.9551 | | | | |
| 209 | 3.14356 | 5.5952 | 2.25011 | 0.81135 | 4.9211 | 3.40191 | 3.97367 | 4.43712 | 2.96883 | 3.9694 | 4.85339 |
| | 2.68618 | 4.42225 | 2.77519 | 2.73123 | 3.46354 | 2.40513 | 3.72494 | 3.29354 | 2.67741 | 2.69355 | 4.2469 |
| | 0.0213 | 4.25552 | 4.97786 | 0.61958 | 0.77255 | 0.48576 | 0.9551 | | | | |
| 210 | 2.37718 | 4.16524 | 3.96337 | 3.38462 | 3.28408 | 3.7344 | 4.03432 | 2.07666 | 3.00165 | 1.80389 | 3.12199 |
| | 2.68618 | 4.42225 | 2.77519 | 2.73123 | 3.46354 | 2.40513 | 3.72494 | 3.29354 | 2.67741 | 2.69355 | 4.2469 |
| | 0.0213 | 4.25552 | 4.97786 | 0.61958 | 0.77255 | 0.48576 | 0.9551 | | | | |
| 211 | 2.66507 | 5.21127 | 3.24607 | 2.55853 | 4.61169 | 3.63561 | 3.68164 | 3.99649 | 1.81126 | 3.46672 | 4.28808 |
| | 2.68618 | 4.42225 | 2.77519 | 2.73123 | 3.46354 | 2.40513 | 3.72494 | 3.29354 | 2.67741 | 2.69355 | 4.2469 |
| | 0.0213 | 4.25552 | 4.97786 | 0.61958 | 0.77255 | 0.48576 | 0.9551 | | | | |
| 212 | 2.63955 | 4.34791 | 3.5221 | 2.96571 | 3.25704 | 3.61127 | 3.85879 | 2.84249 | 2.89256 | 1.65315 | 3.4542 |
| | 2.68618 | 4.42225 | 2.77519 | 2.73123 | 3.46354 | 2.40513 | 3.72494 | 3.29354 | 2.67741 | 2.69355 | 4.2469 |
| | 0.0213 | 4.25552 | 4.97786 | 0.61958 | 0.77255 | 0.48576 | 0.9551 | | | | |
| 213 | 2.22286 | 4.37073 | 3.44616 | 2.54278 | 3.33023 | 3.25665 | 3.83303 | 2.568 | 2.74422 | 2.58376 | 3.06763 |
| | 2.68618 | 4.42225 | 2.77519 | 2.73123 | 3.46354 | 2.40513 | 3.72494 | 3.29354 | 2.67741 | 2.69355 | 4.2469 |
| | 0.0213 | 4.25552 | 4.97786 | 0.61958 | 0.77255 | 0.48576 | 0.9551 | | | | |
| 214 | 2.58034 | 5.27089 | 1.92951 | 2.25116 | 4.61496 | 3.37067 | 3.75818 | 4.0935 | 2.62474 | 3.60964 | 4.40214 |
| | 2.68618 | 4.42225 | 2.77519 | 2.73123 | 3.46354 | 2.40513 | 3.72494 | 3.29354 | 2.67741 | 2.69355 | 4.2469 |
| | 0.0213 | 4.25552 | 4.97786 | 0.61958 | 0.77255 | 0.48576 | 0.9551 | | | | |
| 215 | 3.14939 | 5.49467 | 0.76444 | 2.4005 | 5.02233 | 2.66996 | 4.09716 | 4.6021 | 3.203 | 4.12792 | 5.0223 |
| | 2.68618 | 4.42225 | 2.77519 | 2.73123 | 3.46354 | 2.40513 | 3.72494 | 3.29354 | 2.67741 | 2.69355 | 4.2469 |
| | 0.0213 | 4.25552 | 4.97786 | 0.61958 | 0.77255 | 0.48576 | 0.9551 | | | | |
| 216 | 2.4882 | 5.01531 | 2.94405 | 2.39158 | 4.31308 | 3.05376 | 3.31424 | 3.76108 | 2.30985 | 3.29748 | 4.07233 |
| | 2.68618 | 4.42225 | 2.77519 | 2.73123 | 3.46354 | 2.40513 | 3.72494 | 3.29354 | 2.67741 | 2.69355 | 4.2469 |
| | 0.0213 | 4.25552 | 4.97786 | 0.61958 | 0.77255 | 0.48576 | 0.9551 | | | | |
| 217 | 2.62023 | 4.17052 | 3.85283 | 3.27554 | 3.28797 | 3.67909 | 3.56574 | 2.16353 | 3.17431 | 2.36821 | 3.08873 |
| | 2.68618 | 4.42225 | 2.77519 | 2.73123 | 3.46354 | 2.40513 | 3.72494 | 3.29354 | 2.67741 | 2.69355 | 4.2469 |
| | 0.0213 | 4.25552 | 4.97786 | 0.61958 | 0.77255 | 0.48576 | 0.9551 | | | | |
| 218 | 3.01014 | 3.37642 | 4.75985 | 4.17116 | 2.87029 | 4.22161 | 4.54719 | 2.1197 | 4.02208 | 1.08314 | 2.73819 |
| | 2.68618 | 4.42225 | 2.77519 | 2.73123 | 3.46354 | 2.40513 | 3.72494 | 3.29354 | 2.67741 | 2.69355 | 4.2469 |
| | 0.0213 | 4.25552 | 4.97786 | 0.61958 | 0.77255 | 0.48576 | 0.9551 | | | | |
| 219 | 2.56239 | 4.49247 | 3.38583 | 3.07732 | 4.11907 | 3.28084 | 4.16133 | 3.54676 | 3.04325 | 2.87578 | 4.17089 |
| | 2.68618 | 4.42225 | 2.77519 | 2.73123 | 3.46354 | 2.40513 | 3.72494 | 3.29354 | 2.67741 | 2.69355 | 4.2469 |
| | 0.0213 | 4.25552 | 4.97786 | 0.61958 | 0.77255 | 0.48576 | 0.9551 | | | | |
| 220 | 2.6177 | 4.361 | 3.51255 | 3.00735 | 3.56971 | 3.53493 | 3.93577 | 2.90704 | 2.93536 | 1.51918 | 3.54787 |
| | 2.68618 | 4.42225 | 2.77519 | 2.73123 | 3.46354 | 2.40513 | 3.72494 | 3.29354 | 2.67741 | 2.69355 | 4.2469 |
| | 0.0213 | 4.25552 | 4.97786 | 0.61958 | 0.77255 | 0.48576 | 0.9551 | | | | |
| 221 | 2.352 | 3.4778 | 3.32874 | 2.65448 | 3.62786 | 3.54475 | 3.57969 | 2.66373 | 2.73498 | 2.69126 | 3.56621 |
| | 2.68618 | 4.42225 | 2.77519 | 2.73123 | 3.46354 | 2.40513 | 3.72494 | 3.29354 | 2.67741 | 2.69355 | 4.2469 |
| | 0.0213 | 4.25552 | 4.97786 | 0.61958 | 0.77255 | 0.48576 | 0.9551 | | | | |
| 222 | 1.88353 | 4.27599 | 3.5753 | 3.01584 | 3.44578 | 3.58952 | 3.88616 | 2.6495 | 2.95645 | 2.44986 | 3.41792 |
| | 2.68618 | 4.42225 | 2.77519 | 2.73123 | 3.46354 | 2.40513 | 3.72494 | 3.29354 | 2.67741 | 2.69355 | 4.2469 |
| | 0.0213 | 4.25552 | 4.97786 | 0.61958 | 0.77255 | 0.48576 | 0.9551 | | | | |
| 223 | 2.60199 | 4.1717 | 3.2724 | 2.7169 | 3.74804 | 3.20409 | 3.78685 | 2.75611 | 2.69063 | 2.70202 | 3.6666 |
| | 2.68618 | 4.42225 | 2.77519 | 2.73123 | 3.46354 | 2.40513 | 3.72494 | 3.29354 | 2.67741 | 2.69355 | 4.2469 |
| | 0.0213 | 4.25552 | 4.97786 | 0.61958 | 0.77255 | 0.48576 | 0.9551 | | | | |
| 224 | 3.13751 | 5.60334 | 0.85777 | 2.30642 | 4.69686 | 3.38916 | 3.15717 | 4.47109 | 3.00456 | 3.96566 | 4.85469 |
| | 2.68618 | 4.42225 | 2.77519 | 2.73123 | 3.46354 | 2.40513 | 3.72494 | 3.29354 | 2.67741 | 2.69355 | 4.2469 |
| | 0.0213 | 4.25552 | 4.97786 | 0.61958 | 0.77255 | 0.48576 | 0.9551 | | | | |
| 225 | 2.57839 | 4.19752 | 3.9564 | 3.37554 | 3.10269 | 3.74858 | 4.03631 | 2.54713 | 3.11039 | 1.54297 | 3.01766 |
| | 2.68618 | 4.42225 | 2.77519 | 2.73123 | 3.46354 | 2.40513 | 3.72494 | 3.29354 | 2.67741 | 2.69355 | 4.2469 |
| | 0.0213 | 4.25552 | 4.97786 | 0.61958 | 0.77255 | 0.48576 | 0.9551 | | | | |
| 226 | 2.83801 | 3.502 | 4.42801 | 3.8439 | 3.05406 | 3.98561 | 4.31581 | 2.36567 | 3.70484 | 1.56202 | 1.78511 |
| | 2.68618 | 4.42225 | 2.77519 | 2.73123 | 3.46354 | 2.40513 | 3.72494 | 3.29354 | 2.67741 | 2.69355 | 4.2469 |
| | 0.0213 | 4.25552 | 4.97786 | 0.61958 | 0.77255 | 0.48576 | 0.9551 | | | | |
| 227 | 3.26391 | 4.77044 | 4.39688 | 3.99452 | 2.70417 | 4.04528 | 4.02134 | 3.11204 | 3.6702 | 2.56627 | 3.80967 |
| | 2.68618 | 4.42225 | 2.77519 | 2.73123 | 3.46354 | 2.40513 | 3.72494 | 3.29354 | 2.67741 | 2.69355 | 4.2469 |
| | 0.0213 | 4.25552 | 4.97786 | 0.61958 | 0.77255 | 0.48576 | 0.9551 | | | | |
| 228 | 2.49314 | 5.24256 | 2.22698 | 1.83454 | 4.5628 | 3.39193 | 3.67321 | 4.04724 | 2.28451 | 3.53789 | 4.3018 |
| | 2.68618 | 4.42225 | 2.77519 | 2.73123 | 3.46354 | 2.40513 | 3.72494 | 3.29354 | 2.67741 | 2.69355 | 4.2469 |
| | 0.0213 | 4.25552 | 4.97786 | 0.61958 | 0.77255 | 0.48576 | 0.9551 | | | | |
| 229 | 3.04748 | 4.5113 | 3.8273 | 3.78287 | 2.98645 | 4.15599 | 4.4144 | 2.27082 | 3.68251 | 0.95084 | 3.15372 |
| | 2.68618 | 4.42225 | 2.77519 | 2.73123 | 3.46354 | 2.40513 | 3.72494 | 3.29354 | 2.67741 | 2.69355 | 4.2469 |
| | 0.0213 | 4.25552 | 4.97786 | 0.61958 | 0.77255 | 0.48576 | 0.9551 | | | | |
| 230 | 1.28917 | 3.34957 | 3.88699 | 3.43097 | 4.10644 | 3.14885 | 4.32107 | 3.43592 | 3.37015 | 3.18956 | 4.04758 |
| | 2.68618 | 4.42225 | 2.77519 | 2.73123 | 3.46354 | 2.40513 | 3.72494 | 3.29354 | 2.67741 | 2.69355 | 4.2469 |
| | 0.0213 | 4.25552 | 4.97786 | 0.61958 | 0.77255 | 0.48576 | 0.9551 | | | | |
| 231 | 3.6167 | 4.975 | 4.80486 | 4.46322 | 3.33052 | 4.46513 | 5.00174 | 2.57039 | 4.22888 | 0.51488 | 3.26288 |
| | 2.68618 | 4.42225 | 2.77519 | 2.73123 | 3.46354 | 2.40513 | 3.72494 | 3.29354 | 2.67741 | 2.69355 | 4.2469 |
| | 0.0213 | 4.25552 | 4.97786 | 0.61958 | 0.77255 | 0.48576 | 0.9551 | | | | |
| 232 | 3.34403 | 5.01806 | 3.99464 | 3.90067 | 4.83531 | 3.68485 | 4.93048 | 4.50058 | 3.99508 | 4.07601 | 5.15317 |
| | 2.68618 | 4.42225 | 2.77519 | 2.73123 | 3.46354 | 2.40513 | 3.72494 | 3.29354 | 2.67741 | 2.69355 | 4.2469 |
| | 0.0213 | 4.25552 | 4.97786 | 0.61958 | 0.77255 | 0.48576 | 0.9551 | | | | |
| 233 | 2.63713 | 4.55028 | 2.95478 | 2.30553 | 3.72673 | 3.53787 | 3.77189 | 2.67286 | 2.58802 | 2.57738 | 3.6445 |
| | 2.68618 | 4.42225 | 2.77519 | 2.73123 | 3.46354 | 2.40513 | 3.72494 | 3.29354 | 2.67741 | 2.69355 | 4.2469 |
| | 0.0213 | 4.25552 | 4.97786 | 0.61958 | 0.77255 | 0.48576 | 0.9551 | | | | |
| 234 | 2.61909 | 4.65694 | 2.69579 | 2.81048 | 4.65735 | 0.91836 | 4.24118 | 4.15384 | 3.2676 | 3.79429 | 4.6376 |
| | 2.68618 | 4.42225 | 2.77519 | 2.73123 | 3.46354 | 2.40513 | 3.72494 | 3.29354 | 2.67741 | 2.69355 | 4.2469 |
| | 0.0213 | 4.25552 | 4.97786 | 0.61958 | 0.77255 | 0.48576 | 0.9551 | | | | |
| 235 | 1.7832 | 3.74573 | 3.89601 | 3.3887 | 3.71468 | 3.35467 | 4.19431 | 2.91873 | 3.31614 | 2.77255 | 3.67982 |
| | 2.68618 | 4.42225 | 2.77519 | 2.73123 | 3.46354 | 2.40513 | 3.72494 | 3.29354 | 2.67741 | 2.69355 | 4.2469 |
| | 0.0213 | 4.25552 | 4.97786 | 0.61958 | 0.77255 | 0.48576 | 0.9551 | | | | |
| 236 | 3.05465 | 5.54253 | 0.92516 | 2.25842 | 4.93194 | 3.32878 | 3.94719 | 4.46136 | 3.00238 | 3.99095 | 4.85699 |
| | 2.68618 | 4.42225 | 2.77519 | 2.73123 | 3.46354 | 2.40513 | 3.72494 | 3.29354 | 2.67741 | 2.69355 | 4.2469 |
| | 0.0213 | 4.25552 | 4.97786 | 0.61958 | 0.77255 | 0.48576 | 0.9551 | | | | |
| 237 | 3.12369 | 5.18896 | 3.56345 | 2.94224 | 4.64329 | 3.74495 | 3.7627 | 4.00967 | 2.05338 | 3.47496 | 4.36413 |
| | 2.68618 | 4.42225 | 2.77519 | 2.73123 | 3.46354 | 2.40513 | 3.72494 | 3.29354 | 2.67741 | 2.69355 | 4.2469 |
| | 0.0213 | 4.25552 | 4.97786 | 0.61958 | 0.77255 | 0.48576 | 0.9551 | | | | |
| 238 | 3.0673 | 5.53935 | 0.86896 | 2.26452 | 4.94767 | 3.3187 | 3.97556 | 4.52216 | 3.06249 | 4.04571 | 4.92102 |
| | 2.68618 | 4.42225 | 2.77519 | 2.73123 | 3.46354 | 2.40513 | 3.72494 | 3.29354 | 2.67741 | 2.69355 | 4.2469 |
| | 0.0213 | 4.25552 | 4.97786 | 0.61958 | 0.77255 | 0.48576 | 0.9551 | | | | |
| 239 | 3.5141 | 5.23055 | 3.59545 | 3.41016 | 3.63357 | 3.83874 | 0.54184 | 4.27958 | 3.24679 | 3.71577 | 4.8026 |
| | 2.68618 | 4.42225 | 2.77519 | 2.73123 | 3.46354 | 2.40513 | 3.72494 | 3.29354 | 2.67741 | 2.69355 | 4.2469 |
| | 0.0213 | 4.25552 | 4.97786 | 0.61958 | 0.77255 | 0.48576 | 0.9551 | | | | |
| 240 | 2.72756 | 4.97101 | 2.89474 | 1.46299 | 4.27237 | 3.26146 | 3.71762 | 3.67126 | 2.47081 | 3.26879 | 4.08933 |
| | 2.68618 | 4.42225 | 2.77519 | 2.73123 | 3.46354 | 2.40513 | 3.72494 | 3.29354 | 2.67741 | 2.69355 | 4.2469 |
| | 0.0213 | 4.25552 | 4.97786 | 0.61958 | 0.77255 | 0.48576 | 0.9551 | | | | |
| 241 | 3.41624 | 3.9134 | 4.58391 | 4.16764 | 2.00719 | 4.28964 | 3.70426 | 3.21172 | 4.01677 | 2.71346 | 3.87556 |
| | 2.68618 | 4.42225 | 2.77519 | 2.73123 | 3.46354 | 2.40513 | 3.72494 | 3.29354 | 2.67741 | 2.69355 | 4.2469 |
| | 0.0213 | 4.25552 | 4.97786 | 0.61958 | 0.77255 | 0.48576 | 0.9551 | | | | |
| 242 | 2.34081 | 1.8066 | 3.94181 | 3.45762 | 3.20828 | 3.32229 | 4.2184 | 3.00879 | 3.37351 | 2.78978 | 3.70097 |
| | 2.68618 | 4.42225 | 2.77519 | 2.73123 | 3.46354 | 2.40513 | 3.72494 | 3.29354 | 2.67741 | 2.69355 | 4.2469 |
| | 0.0213 | 4.25552 | 4.97786 | 0.61958 | 0.77255 | 0.48576 | 0.9551 | | | | |
| 243 | 3.01998 | 5.30594 | 2.30384 | 2.42731 | 4.70328 | 3.36933 | 4.01449 | 4.32714 | 3.00906 | 3.89198 | 4.77407 |
| | 2.68618 | 4.42225 | 2.77519 | 2.73123 | 3.46354 | 2.40513 | 3.72494 | 3.29354 | 2.67741 | 2.69355 | 4.2469 |
| | 0.0213 | 4.25552 | 4.97786 | 0.61958 | 0.77255 | 0.48576 | 0.9551 | | | | |
| 244 | 2.85299 | 4.67395 | 3.63506 | 3.3271 | 3.95006 | 3.53174 | 4.31756 | 3.34609 | 3.2219 | 2.4177 | 4.09253 |
| | 2.68618 | 4.42225 | 2.77519 | 2.73123 | 3.46354 | 2.40513 | 3.72494 | 3.29354 | 2.67741 | 2.69355 | 4.2469 |
| | 0.0213 | 4.25552 | 4.97786 | 0.61958 | 0.77255 | 0.48576 | 0.9551 | | | | |
| 245 | 2.63872 | 4.26914 | 3.6729 | 2.66729 | 3.38371 | 3.65952 | 3.92807 | 2.52854 | 3.03031 | 2.0617 | 2.45653 |
| | 2.68618 | 4.42225 | 2.77519 | 2.73123 | 3.46354 | 2.40513 | 3.72494 | 3.29354 | 2.67741 | 2.69355 | 4.2469 |
| | 0.0213 | 4.25552 | 4.97786 | 0.61958 | 0.77255 | 0.48576 | 0.9551 | | | | |
| 246 | 2.06644 | 4.57942 | 3.21268 | 2.65204 | 3.59365 | 3.33762 | 3.74312 | 3.14634 | 2.32144 | 2.81522 | 3.46208 |
| | 2.68618 | 4.42225 | 2.77519 | 2.73123 | 3.46354 | 2.40513 | 3.72494 | 3.29354 | 2.67741 | 2.69355 | 4.2469 |
| | 0.0213 | 4.25552 | 4.97786 | 0.61958 | 0.77255 | 0.48576 | 0.9551 | | | | |
| 247 | 2.42097 | 4.99986 | 2.57153 | 2.33872 | 4.29051 | 2.62131 | 3.62194 | 3.73959 | 2.2761 | 3.28171 | 3.5649 |
| | 2.68618 | 4.42225 | 2.77519 | 2.73123 | 3.46354 | 2.40513 | 3.72494 | 3.29354 | 2.67741 | 2.69355 | 4.2469 |
| | 0.0213 | 4.25552 | 4.97786 | 0.61958 | 0.77255 | 0.48576 | 0.9551 | | | | |
| 248 | 2.63485 | 5.03278 | 2.532 | 2.32444 | 4.33333 | 2.61312 | 3.43393 | 3.78927 | 2.37373 | 2.94474 | 3.74599 |
| | 2.68618 | 4.42225 | 2.77519 | 2.73123 | 3.46354 | 2.40513 | 3.72494 | 3.29354 | 2.67741 | 2.69355 | 4.2469 |
| | 0.0213 | 4.25552 | 4.97786 | 0.61958 | 0.77255 | 0.48576 | 0.9551 | | | | |
| 249 | 2.26615 | 4.88564 | 2.89599 | 2.38085 | 4.14454 | 2.44895 | 3.45952 | 3.57087 | 2.44748 | 3.15727 | 3.95984 |
| | 2.68618 | 4.42225 | 2.7752 | 2.73123 | 3.46354 | 2.40513 | 3.72495 | 3.29354 | 2.67741 | 2.69355 | 4.2469 |
| | 0.3617 | 3.4226 | 1.30608 | 0.52826 | 0.89069 | 0.48576 | 0.9551 | | | | |
| 250 | 2.54954 | 4.17252 | 2.92187 | 2.47432 | 3.85932 | 3.27263 | 3.62554 | 3.12385 | 2.38366 | 2.89437 | 3.72907 |
| | 2.68618 | 4.42225 | 2.77519 | 2.73123 | 3.46354 | 2.40513 | 3.72494 | 3.29354 | 2.67741 | 2.69355 | 4.2469 |
| | 0.02905 | 3.94901 | 4.67135 | 0.61958 | 0.77255 | 0.67539 | 0.71122 | | | | |
| 251 | 2.57457 | 4.62687 | 3.06534 | 2.23629 | 3.4396 | 3.30063 | 3.64972 | 3.22383 | 2.40089 | 2.7796 | 3.711 |
| | 2.68618 | 4.42225 | 2.77519 | 2.73123 | 3.46354 | 2.40513 | 3.72494 | 3.29354 | 2.67741 | 2.69355 | 4.2469 |
| | 0.027 | 4.02109 | 4.74344 | 0.61958 | 0.77255 | 0.54018 | 0.87381 | | | | |
| 252 | 2.60849 | 4.99454 | 2.75341 | 2.18415 | 4.29218 | 3.0117 | 3.07295 | 3.74488 | 2.2561 | 2.90066 | 4.04883 |
| | 2.68618 | 4.42225 | 2.77519 | 2.73123 | 3.46354 | 2.40513 | 3.72494 | 3.29354 | 2.67741 | 2.69355 | 4.2469 |
| | 0.02401 | 4.13724 | 4.85959 | 0.61958 | 0.77255 | 0.47497 | 0.9726 | | | | |
| 253 | 2.46135 | 4.13934 | 3.2243 | 2.66245 | 3.71593 | 3.12543 | 3.7403 | 2.98403 | 2.36968 | 2.26741 | 3.48037 |
| | 2.68618 | 4.42225 | 2.77519 | 2.73123 | 3.46354 | 2.40513 | 3.72494 | 3.29354 | 2.67741 | 2.69355 | 4.2469 |
| | 0.02213 | 4.21762 | 4.93996 | 0.61958 | 0.77255 | 0.53438 | 0.88197 | | | | |
| 254 | 2.50444 | 5.12456 | 2.32291 | 1.79401 | 4.43846 | 3.01478 | 3.63135 | 3.90857 | 2.30988 | 3.4177 | 3.71064 |
| | 2.68618 | 4.42225 | 2.77519 | 2.73123 | 3.46354 | 2.40513 | 3.72494 | 3.29354 | 2.67741 | 2.69355 | 4.2469 |
| | 0.02213 | 4.21762 | 4.93996 | 0.61958 | 0.77255 | 0.45652 | 1.00371 | | | | |
| 255 | 2.49388 | 4.93095 | 3.00082 | 2.43899 | 3.91192 | 3.45492 | 3.64128 | 3.438 | 1.79773 | 3.19888 | 3.7895 |
| | 2.68618 | 4.42225 | 2.77519 | 2.73123 | 3.46354 | 2.40513 | 3.72494 | 3.29354 | 2.67741 | 2.69355 | 4.2469 |
| | 0.0213 | 4.25552 | 4.97786 | 0.61958 | 0.77255 | 0.48576 | 0.9551 | | | | |
| 256 | 3.25318 | 4.5239 | 5.10916 | 4.56715 | 3.49459 | 4.6552 | 5.10831 | 1.24545 | 4.45727 | 1.68982 | 2.86955 |
| | 2.68618 | 4.42225 | 2.77519 | 2.73123 | 3.46354 | 2.40513 | 3.72494 | 3.29354 | 2.67741 | 2.69355 | 4.2469 |
| | 0.0213 | 4.25552 | 4.97786 | 0.61958 | 0.77255 | 0.48576 | 0.9551 | | | | |
| 257 | 2.6338 | 5.04188 | 3.10284 | 2.55441 | 4.42648 | 2.23944 | 3.68366 | 3.84084 | 1.79458 | 3.36504 | 4.16894 |
| | 2.68618 | 4.42225 | 2.77519 | 2.73123 | 3.46354 | 2.40513 | 3.72494 | 3.29354 | 2.67741 | 2.69355 | 4.2469 |
| | 0.0213 | 4.25552 | 4.97786 | 0.61958 | 0.77255 | 0.48576 | 0.9551 | | | | |
| 258 | 2.67312 | 5.09557 | 2.70212 | 2.23624 | 4.41629 | 3.12246 | 3.62298 | 3.87496 | 2.16191 | 3.38343 | 4.14836 |
| | 2.68618 | 4.42225 | 2.77519 | 2.73123 | 3.46354 | 2.40513 | 3.72494 | 3.29354 | 2.67741 | 2.69355 | 4.2469 |
| | 0.0213 | 4.25552 | 4.97786 | 0.61958 | 0.77255 | 0.48576 | 0.9551 | | | | |
| 259 | 2.84443 | 4.31866 | 4.21421 | 3.63569 | 2.80473 | 3.9502 | 4.22469 | 2.33451 | 3.27922 | 1.17312 | 3.13784 |
| | 2.68618 | 4.42225 | 2.77519 | 2.73123 | 3.46354 | 2.40513 | 3.72494 | 3.29354 | 2.67741 | 2.69355 | 4.2469 |
| | 0.0213 | 4.25552 | 4.97786 | 0.61958 | 0.77255 | 0.48576 | 0.9551 | | | | |
| 260 | 2.69899 | 5.03966 | 2.91348 | 2.31935 | 4.34581 | 2.52645 | 3.65636 | 3.78565 | 2.275 | 3.32512 | 4.11332 |
| | 2.68622 | 4.42229 | 2.77523 | 2.73127 | 3.46358 | 2.40516 | 3.72498 | 3.29358 | 2.67744 | 2.69359 | 4.24693 |
| | 0.24534 | 1.55746 | 4.97786 | 0.22027 | 1.62102 | 0.48576 | 0.9551 | | | | |
| 261 | 2.68464 | 4.96848 | 3.04303 | 2.46953 | 4.2532 | 3.48102 | 3.64351 | 3.67843 | 1.92496 | 3.23444 | 3.74123 |
| | 2.68618 | 4.42225 | 2.77519 | 2.73123 | 3.46354 | 2.40513 | 3.72494 | 3.29354 | 2.67741 | 2.69355 | 4.2469 |
| | 0.0213 | 4.25552 | 4.97786 | 0.61958 | 0.77255 | 0.48576 | 0.9551 | | | | |
| 262 | 2.82925 | 1.90123 | 4.5154 | 3.95678 | 3.20762 | 4.00292 | 4.46388 | 2.00496 | 3.82767 | 2.28387 | 3.36108 |
| | 2.68618 | 4.42225 | 2.77519 | 2.73123 | 3.46354 | 2.40513 | 3.72494 | 3.29354 | 2.67741 | 2.69355 | 4.2469 |
| | 0.0213 | 4.25552 | 4.97786 | 0.61958 | 0.77255 | 0.48576 | 0.9551 | | | | |
| 263 | 3.02 | 4.42773 | 4.55738 | 3.97126 | 2.60431 | 4.17447 | 4.44925 | 2.42728 | 3.82945 | 1.10478 | 2.29682 |
| | 2.68618 | 4.42225 | 2.77519 | 2.73123 | 3.46354 | 2.40513 | 3.72494 | 3.29354 | 2.67741 | 2.69355 | 4.2469 |
| | 0.0213 | 4.25552 | 4.97786 | 0.61958 | 0.77255 | 0.48576 | 0.9551 | | | | |
| 264 | 3.20722 | 4.49316 | 5.00708 | 4.47687 | 3.31092 | 4.59942 | 5.07613 | 1.60288 | 4.37679 | 2.11094 | 3.21966 |
| | 2.68618 | 4.42225 | 2.77519 | 2.73123 | 3.46354 | 2.40513 | 3.72494 | 3.29354 | 2.67741 | 2.69355 | 4.2469 |
| | 0.0213 | 4.25552 | 4.97786 | 0.61958 | 0.77255 | 0.48576 | 0.9551 | | | | |
| 265 | 2.47442 | 3.72768 | 3.50758 | 2.93968 | 3.46562 | 3.59791 | 3.85397 | 2.49965 | 2.89047 | 2.39448 | 3.43347 |
| | 2.68618 | 4.42225 | 2.77519 | 2.73123 | 3.46354 | 2.40513 | 3.72494 | 3.29354 | 2.67741 | 2.69355 | 4.2469 |
| | 0.0213 | 4.25552 | 4.97786 | 0.61958 | 0.77255 | 0.48576 | 0.9551 | | | | |
| 266 | 2.60251 | 4.42351 | 3.42569 | 2.90118 | 3.64053 | 1.66968 | 3.888 | 3.01906 | 2.84869 | 2.73324 | 3.20683 |
| | 2.68618 | 4.42225 | 2.77519 | 2.73123 | 3.46354 | 2.40513 | 3.72494 | 3.29354 | 2.67741 | 2.69355 | 4.2469 |
| | 0.0213 | 4.25552 | 4.97786 | 0.61958 | 0.77255 | 0.48576 | 0.9551 | | | | |
| 267 | 2.62169 | 3.46323 | 3.44614 | 2.88159 | 2.91217 | 3.1966 | 3.5939 | 2.88436 | 2.83697 | 2.59045 | 3.47903 |
| | 2.68618 | 4.42225 | 2.77519 | 2.73123 | 3.46354 | 2.40513 | 3.72494 | 3.29354 | 2.67741 | 2.69355 | 4.2469 |
| | 0.0213 | 4.25552 | 4.97786 | 0.61958 | 0.77255 | 0.48576 | 0.9551 | | | | |
| 268 | 2.65236 | 5.07623 | 2.38422 | 2.14728 | 4.0421 | 2.46953 | 3.62468 | 3.84771 | 2.38499 | 3.17843 | 4.13065 |
| | 2.68618 | 4.42225 | 2.77519 | 2.73123 | 3.46354 | 2.40513 | 3.72494 | 3.29354 | 2.67741 | 2.69355 | 4.2469 |
| | 0.0213 | 4.25552 | 4.97786 | 0.61958 | 0.77255 | 0.48576 | 0.9551 | | | | |
| 269 | 2.82989 | 5.15783 | 2.44532 | 2.24882 | 4.51176 | 1.49048 | 3.78835 | 3.96384 | 2.61007 | 3.51345 | 4.33114 |
| | 2.68618 | 4.42225 | 2.77519 | 2.73123 | 3.46354 | 2.40513 | 3.72494 | 3.29354 | 2.67741 | 2.69355 | 4.2469 |
| | 0.0213 | 4.25552 | 4.97786 | 0.61958 | 0.77255 | 0.48576 | 0.9551 | | | | |
| 270 | 3.45489 | 5.58801 | 0.49459 | 2.66181 | 5.02904 | 3.55014 | 4.33669 | 4.71613 | 3.50291 | 4.26044 | 5.2638 |
| | 2.68618 | 4.42225 | 2.77519 | 2.73123 | 3.46354 | 2.40513 | 3.72494 | 3.29354 | 2.67741 | 2.69355 | 4.2469 |
| | 0.0213 | 4.25552 | 4.97786 | 0.61958 | 0.77255 | 0.48576 | 0.9551 | | | | |
| 271 | 2.6365 | 4.48975 | 3.54692 | 3.11493 | 3.87196 | 3.44652 | 4.1206 | 2.83494 | 2.99698 | 2.66163 | 3.83607 |
| | 2.68618 | 4.42225 | 2.77519 | 2.73123 | 3.46354 | 2.40513 | 3.72494 | 3.29354 | 2.67741 | 2.69355 | 4.2469 |
| | 0.0213 | 4.25552 | 4.97786 | 0.61958 | 0.77255 | 0.48576 | 0.9551 | | | | |
| 272 | 2.73483 | 4.24792 | 4.06306 | 3.49098 | 3.27283 | 3.81333 | 4.1379 | 2.49748 | 3.37247 | 1.38006 | 2.63831 |
| | 2.68618 | 4.42225 | 2.77519 | 2.73123 | 3.46354 | 2.40513 | 3.72494 | 3.29354 | 2.67741 | 2.69355 | 4.2469 |
| | 0.0213 | 4.25552 | 4.97786 | 0.61958 | 0.77255 | 0.48576 | 0.9551 | | | | |
| 273 | 2.63386 | 4.09315 | 4.14883 | 3.56025 | 2.83115 | 3.74665 | 3.74659 | 2.04132 | 3.42641 | 2.0998 | 3.19065 |
| | 2.68618 | 4.42225 | 2.77519 | 2.73123 | 3.46354 | 2.40513 | 3.72494 | 3.29354 | 2.67741 | 2.69355 | 4.2469 |
| | 0.0213 | 4.25552 | 4.97786 | 0.61958 | 0.77255 | 0.48576 | 0.9551 | | | | |
| 274 | 3.45489 | 5.58801 | 0.49459 | 2.66181 | 5.02904 | 3.55014 | 4.33669 | 4.71613 | 3.50291 | 4.26044 | 5.2638 |
| | 2.68618 | 4.42225 | 2.77519 | 2.73123 | 3.46354 | 2.40513 | 3.72494 | 3.29354 | 2.67741 | 2.69355 | 4.2469 |
| | 0.0213 | 4.25552 | 4.97786 | 0.61958 | 0.77255 | 0.48576 | 0.9551 | | | | |
| 275 | 3.23995 | 5.28638 | 3.76625 | 3.02323 | 4.728 | 3.84715 | 3.73875 | 4.0651 | 1.77809 | 3.29347 | 4.39999 |
| | 2.68618 | 4.42225 | 2.77519 | 2.73123 | 3.46354 | 2.40513 | 3.72494 | 3.29354 | 2.67741 | 2.69355 | 4.2469 |
| | 0.0213 | 4.25552 | 4.97786 | 0.61958 | 0.77255 | 0.48576 | 0.9551 | | | | |
| 276 | 2.68753 | 4.87031 | 3.00963 | 2.53961 | 4.22381 | 3.44011 | 3.73761 | 3.4103 | 2.47454 | 3.23527 | 4.05648 |
| | 2.68618 | 4.42225 | 2.77519 | 2.73123 | 3.46354 | 2.40513 | 3.72494 | 3.29354 | 2.67741 | 2.69355 | 4.2469 |
| | 0.0213 | 4.25552 | 4.97786 | 0.61958 | 0.77255 | 0.48576 | 0.9551 | | | | |
| 277 | 2.6733 | 4.68298 | 3.21922 | 2.64183 | 3.88384 | 3.53798 | 3.72335 | 2.82769 | 2.179 | 2.80765 | 3.43324 |
| | 2.68618 | 4.42225 | 2.77519 | 2.73123 | 3.46354 | 2.40513 | 3.72494 | 3.29354 | 2.67741 | 2.69355 | 4.2469 |
| | 0.0213 | 4.25552 | 4.97786 | 0.61958 | 0.77255 | 0.48576 | 0.9551 | | | | |
| 278 | 2.55174 | 5.18765 | 2.3181 | 1.60966 | 4.5046 | 3.23667 | 3.4423 | 3.98017 | 2.44559 | 3.48195 | 4.24755 |
| | 2.68618 | 4.42225 | 2.77519 | 2.73123 | 3.46354 | 2.40513 | 3.72494 | 3.29354 | 2.67741 | 2.69355 | 4.2469 |
| | 0.0213 | 4.25552 | 4.97786 | 0.61958 | 0.77255 | 0.48576 | 0.9551 | | | | |
| 279 | 3.29516 | 4.62289 | 4.95445 | 4.39964 | 1.78595 | 4.51042 | 4.68391 | 2.31196 | 4.26 | 1.14468 | 3.03611 |
| | 2.68618 | 4.42225 | 2.77519 | 2.73123 | 3.46354 | 2.40513 | 3.72494 | 3.29354 | 2.67741 | 2.69355 | 4.2469 |
| | 0.0213 | 4.25552 | 4.97786 | 0.61958 | 0.77255 | 0.48576 | 0.9551 | | | | |
| 280 | 1.93349 | 4.37072 | 4.32671 | 3.8479 | 3.72065 | 3.88189 | 4.61677 | 2.14138 | 3.7436 | 2.33597 | 3.60497 |
| | 2.68618 | 4.42225 | 2.77519 | 2.73123 | 3.46354 | 2.40513 | 3.72494 | 3.29354 | 2.67741 | 2.69355 | 4.2469 |
| | 0.0213 | 4.25552 | 4.97786 | 0.61958 | 0.77255 | 0.48576 | 0.9551 | | | | |
| 281 | 2.75321 | 5.1783 | 2.83303 | 2.27749 | 4.53037 | 3.47744 | 3.63753 | 3.98048 | 1.73366 | 3.46015 | 4.23171 |
| | 2.68618 | 4.42225 | 2.77519 | 2.73123 | 3.46354 | 2.40513 | 3.72494 | 3.29354 | 2.67741 | 2.69355 | 4.2469 |
| | 0.0213 | 4.25552 | 4.97786 | 0.61958 | 0.77255 | 0.48576 | 0.9551 | | | | |
| 282 | 2.49895 | 4.13751 | 4.24952 | 3.65818 | 3.16064 | 3.81872 | 4.12462 | 2.27674 | 3.51633 | 1.68838 | 2.09863 |
| | 2.68618 | 4.42225 | 2.77519 | 2.73123 | 3.46354 | 2.40513 | 3.72494 | 3.29354 | 2.67741 | 2.69355 | 4.2469 |
| | 0.0213 | 4.25552 | 4.97786 | 0.61958 | 0.77255 | 0.48576 | 0.9551 | | | | |
| 283 | 3.49743 | 4.80833 | 5.10627 | 4.53987 | 3.15607 | 4.75636 | 5.05673 | 2.29267 | 4.37793 | 0.77362 | 2.16533 |
| | 2.68618 | 4.42225 | 2.77519 | 2.73123 | 3.46354 | 2.40513 | 3.72494 | 3.29354 | 2.67741 | 2.69355 | 4.2469 |
| | 0.0213 | 4.25552 | 4.97786 | 0.61958 | 0.77255 | 0.48576 | 0.9551 | | | | |
| 284 | 2.67425 | 5.04246 | 2.96181 | 1.78507 | 4.34741 | 3.45204 | 3.25784 | 3.46847 | 2.0028 | 3.32062 | 4.09834 |
| | 2.68618 | 4.42225 | 2.77519 | 2.73123 | 3.46354 | 2.40513 | 3.72494 | 3.29354 | 2.67741 | 2.69355 | 4.2469 |
| | 0.0213 | 4.25552 | 4.97786 | 0.61958 | 0.77255 | 0.48576 | 0.9551 | | | | |
| 285 | 2.18497 | 5.09173 | 2.73433 | 2.09101 | 4.40765 | 2.98645 | 3.62641 | 3.87259 | 2.04636 | 3.38583 | 4.14806 |
| | 2.68618 | 4.42225 | 2.77519 | 2.73123 | 3.46354 | 2.40513 | 3.72494 | 3.29354 | 2.67741 | 2.69355 | 4.2469 |
| | 0.0213 | 4.25552 | 4.97786 | 0.61958 | 0.77255 | 0.48576 | 0.9551 | | | | |
| 286 | 2.44001 | 4.00454 | 3.01117 | 2.44729 | 4.26774 | 3.46287 | 3.43871 | 3.69942 | 2.00307 | 3.25166 | 4.04275 |
| | 2.68618 | 4.42225 | 2.77519 | 2.73123 | 3.46354 | 2.40513 | 3.72494 | 3.29354 | 2.67741 | 2.69355 | 4.2469 |
| | 0.0213 | 4.25552 | 4.97786 | 0.61958 | 0.77255 | 0.48576 | 0.9551 | | | | |
| 287 | 3.21325 | 4.93276 | 3.96373 | 3.91957 | 5.02096 | 0.32494 | 4.99846 | 4.73153 | 4.15183 | 4.33001 | 5.32112 |
| | 2.68612 | 4.42226 | 2.77521 | 2.73125 | 3.46355 | 2.40508 | 3.72496 | 3.29355 | 2.67735 | 2.69356 | 4.24691 |
| | 0.04839 | 3.2103 | 4.97786 | 0.76165 | 0.62904 | 0.48576 | 0.9551 | | | | |
| 288 | 2.81074 | 4.42319 | 4.66205 | 4.14475 | 3.70592 | 4.29114 | 4.85958 | 1.8405 | 4.02996 | 2.19564 | 3.54246 |
| | 2.68618 | 4.42225 | 2.77519 | 2.73123 | 3.46354 | 2.40513 | 3.72494 | 3.29354 | 2.67741 | 2.69355 | 4.2469 |
| | 0.0213 | 4.25552 | 4.97786 | 0.61958 | 0.77255 | 0.48576 | 0.9551 | | | | |
| 289 | 2.51151 | 5.16672 | 2.39686 | 2.05227 | 4.50106 | 3.40534 | 2.94125 | 3.98238 | 2.27299 | 3.46563 | 4.21348 |
| | 2.68618 | 4.42225 | 2.77519 | 2.73123 | 3.46354 | 2.40513 | 3.72494 | 3.29354 | 2.67741 | 2.69355 | 4.2469 |
| | 0.0213 | 4.25552 | 4.97786 | 0.61958 | 0.77255 | 0.48576 | 0.9551 | | | | |
| 290 | 2.89766 | 4.47264 | 4.68 | 4.22123 | 3.73696 | 4.21922 | 4.95695 | 1.94721 | 4.07257 | 2.32057 | 3.32611 |
| | 2.68618 | 4.42225 | 2.77519 | 2.73123 | 3.46354 | 2.40513 | 3.72494 | 3.29354 | 2.67741 | 2.69355 | 4.2469 |
| | 0.0213 | 4.25552 | 4.97786 | 0.61958 | 0.77255 | 0.48576 | 0.9551 | | | | |
| 291 | 2.65493 | 4.7112 | 2.97929 | 2.10081 | 3.92515 | 3.49629 | 3.72875 | 3.15306 | 2.41153 | 2.95305 | 3.80241 |
| | 2.68618 | 4.42225 | 2.77519 | 2.73123 | 3.46354 | 2.40513 | 3.72494 | 3.29354 | 2.67741 | 2.69355 | 4.2469 |
| | 0.0213 | 4.25552 | 4.97786 | 0.61958 | 0.77255 | 0.48576 | 0.9551 | | | | |
| 292 | 1.93719 | 4.87093 | 2.99706 | 2.17255 | 4.14496 | 3.10869 | 3.668 | 3.56695 | 2.38983 | 3.15654 | 3.96244 |
| | 2.68618 | 4.42225 | 2.77519 | 2.73123 | 3.46354 | 2.40513 | 3.72494 | 3.29354 | 2.67741 | 2.69355 | 4.2469 |
| | 0.0213 | 4.25552 | 4.97786 | 0.61958 | 0.77255 | 0.48576 | 0.9551 | | | | |
| 293 | 2.64823 | 5.04328 | 2.8542 | 2.32909 | 4.35086 | 3.43433 | 2.9811 | 3.80385 | 2.02386 | 3.32758 | 3.57284 |
| | 2.68618 | 4.42225 | 2.77519 | 2.73123 | 3.46354 | 2.40513 | 3.72494 | 3.29354 | 2.67741 | 2.69355 | 4.2469 |
| | 0.0213 | 4.25552 | 4.97786 | 0.61958 | 0.77255 | 0.48576 | 0.9551 | | | | |
| 294 | 2.76882 | 4.1988 | 4.32404 | 3.74372 | 1.66172 | 3.88977 | 4.1087 | 2.41086 | 3.60436 | 1.91576 | 2.91596 |
| | 2.68618 | 4.42225 | 2.77519 | 2.73123 | 3.46354 | 2.40513 | 3.72494 | 3.29354 | 2.67741 | 2.69355 | 4.2469 |
| | 0.0213 | 4.25552 | 4.97786 | 0.61958 | 0.77255 | 0.48576 | 0.9551 | | | | |
| 295 | 2.56564 | 5.02622 | 2.32505 | 2.23525 | 4.32416 | 3.27898 | 3.619 | 3.77857 | 2.31036 | 3.31114 | 4.08034 |
| | 2.68618 | 4.42225 | 2.77519 | 2.73123 | 3.46354 | 2.40513 | 3.72494 | 3.29354 | 2.67741 | 2.69355 | 4.2469 |
| | 0.0213 | 4.25552 | 4.97786 | 0.61958 | 0.77255 | 0.48576 | 0.9551 | | | | |
| 296 | 2.6898 | 5.15584 | 2.16623 | 1.87611 | 4.47398 | 2.99689 | 3.64079 | 3.94745 | 2.25596 | 3.44884 | 4.20944 |
| | 2.68618 | 4.42225 | 2.77519 | 2.73123 | 3.46354 | 2.40513 | 3.72494 | 3.29354 | 2.67741 | 2.69355 | 4.2469 |
| | 0.0213 | 4.25552 | 4.97786 | 0.61958 | 0.77255 | 0.48576 | 0.9551 | | | | |
| 297 | 2.34498 | 4.95915 | 2.53276 | 2.29117 | 4.23019 | 2.09196 | 3.67539 | 3.66339 | 2.42365 | 3.2394 | 4.03998 |
| | 2.68618 | 4.42225 | 2.77519 | 2.73123 | 3.46354 | 2.40513 | 3.72494 | 3.29354 | 2.67741 | 2.69355 | 4.2469 |
| | 0.0213 | 4.25552 | 4.97786 | 0.61958 | 0.77255 | 0.48576 | 0.9551 | | | | |
| 298 | 2.70636 | 4.89473 | 2.44406 | 2.49039 | 4.38194 | 1.42345 | 3.60703 | 3.84057 | 2.76001 | 3.43492 | 4.25973 |
| | 2.68618 | 4.42225 | 2.77519 | 2.73123 | 3.46354 | 2.40513 | 3.72494 | 3.29354 | 2.67741 | 2.69355 | 4.2469 |
| | 0.04054 | 4.25552 | 3.6672 | 0.61958 | 0.77255 | 0.48576 | 0.9551 | | | | |
| 299 | 2.65614 | 3.18364 | 4.06911 | 3.49167 | 1.97653 | 3.74134 | 3.46093 | 2.58799 | 3.14746 | 2.321 | 3.25154 |
| | 2.68618 | 4.42225 | 2.77519 | 2.73123 | 3.46354 | 2.40513 | 3.72494 | 3.29354 | 2.67741 | 2.69355 | 4.2469 |
| | 0.02171 | 4.23668 | 4.95903 | 0.61958 | 0.77255 | 0.47063 | 0.97979 | | | | |
| 300 | 3.5141 | 5.23055 | 3.59545 | 3.41016 | 3.63357 | 3.83874 | 0.54184 | 4.27958 | 3.24679 | 3.71577 | 4.8026 |
| | 2.68618 | 4.42225 | 2.77519 | 2.73123 | 3.46354 | 2.40513 | 3.72494 | 3.29354 | 2.67741 | 2.69355 | 4.2469 |
| | 0.0213 | 4.25552 | 4.97786 | 0.61958 | 0.77255 | 0.48576 | 0.9551 | | | | |
| 301 | 2.13882 | 4.47679 | 3.34006 | 2.82079 | 3.86735 | 1.78241 | 3.88707 | 3.23094 | 2.79169 | 2.73054 | 3.51703 |
| | 2.68618 | 4.42225 | 2.77519 | 2.73123 | 3.46354 | 2.40513 | 3.72494 | 3.29354 | 2.67741 | 2.69355 | 4.2469 |
| | 0.0213 | 4.25552 | 4.97786 | 0.61958 | 0.77255 | 0.48576 | 0.9551 | | | | |
| 302 | 2.39981 | 3.78637 | 4.10096 | 3.27816 | 3.24279 | 3.75552 | 4.07271 | 2.01122 | 3.4022 | 2.301 | 2.63105 |
| | 2.68618 | 4.42225 | 2.77519 | 2.73123 | 3.46354 | 2.40513 | 3.72494 | 3.29354 | 2.67741 | 2.69355 | 4.2469 |
| | 0.0213 | 4.25552 | 4.97786 | 0.61958 | 0.77255 | 0.48576 | 0.9551 | | | | |
| 303 | 2.75206 | 5.19459 | 2.29843 | 1.44672 | 3.91789 | 3.39892 | 3.69215 | 3.96001 | 2.50524 | 3.48083 | 4.26301 |
| | 2.68618 | 4.42225 | 2.77519 | 2.73123 | 3.46354 | 2.40513 | 3.72494 | 3.29354 | 2.67741 | 2.69355 | 4.2469 |
| | 0.0213 | 4.25552 | 4.97786 | 0.61958 | 0.77255 | 0.48576 | 0.9551 | | | | |
| 304 | 2.61261 | 3.69779 | 3.67003 | 3.30824 | 2.75096 | 3.72571 | 4.03296 | 2.19251 | 3.41634 | 1.86586 | 3.03542 |
| | 2.68618 | 4.42225 | 2.77519 | 2.73123 | 3.46354 | 2.40513 | 3.72494 | 3.29354 | 2.67741 | 2.69355 | 4.2469 |
| | 0.0213 | 4.25552 | 4.97786 | 0.61958 | 0.77255 | 0.48576 | 0.9551 | | | | |
| 305 | 2.61251 | 4.09277 | 4.06076 | 3.47456 | 2.24559 | 3.03691 | 4.01288 | 2.35755 | 3.3562 | 2.18545 | 2.938 |
| | 2.68618 | 4.42225 | 2.77519 | 2.73123 | 3.46354 | 2.40513 | 3.72494 | 3.29354 | 2.67741 | 2.69355 | 4.2469 |
| | 0.0213 | 4.25552 | 4.97786 | 0.61958 | 0.77255 | 0.48576 | 0.9551 | | | | |
| 306 | 2.90848 | 5.41832 | 1.29325 | 1.96467 | 4.71447 | 3.37696 | 3.7858 | 4.19593 | 2.43441 | 3.70542 | 4.51235 |
| | 2.68618 | 4.42225 | 2.77519 | 2.73123 | 3.46354 | 2.40513 | 3.72494 | 3.29354 | 2.67741 | 2.69355 | 4.2469 |
| | 0.0213 | 4.25552 | 4.97786 | 0.61958 | 0.77255 | 0.48576 | 0.9551 | | | | |
| 307 | 2.4578 | 4.66658 | 3.07379 | 2.54401 | 4.0584 | 3.19558 | 3.8262 | 3.4527 | 2.67382 | 3.09889 | 3.94077 |
| | 2.68618 | 4.42225 | 2.77519 | 2.73123 | 3.46354 | 2.40513 | 3.72494 | 3.29354 | 2.67741 | 2.69355 | 4.2469 |
| | 0.0213 | 4.25552 | 4.97786 | 0.61958 | 0.77255 | 0.48576 | 0.9551 | | | | |
| 308 | 2.45461 | 5.01237 | 2.9391 | 2.27072 | 4.30765 | 3.43681 | 3.62961 | 3.75315 | 2.07456 | 2.98146 | 4.07153 |
| | 2.68619 | 4.42226 | 2.7752 | 2.73124 | 3.46339 | 2.40514 | 3.72495 | 3.29355 | 2.67734 | 2.69356 | 4.24691 |
| | 0.04727 | 3.23695 | 4.97786 | 0.6378 | 0.75174 | 0.48576 | 0.9551 | | | | |
| 309 | 2.7049 | 3.94849 | 3.05443 | 2.41168 | 4.30093 | 3.49162 | 3.39525 | 3.44696 | 1.62805 | 3.26986 | 4.06486 |
| | 2.68618 | 4.42225 | 2.77519 | 2.73123 | 3.46354 | 2.40513 | 3.72494 | 3.29354 | 2.67741 | 2.69355 | 4.2469 |
| | 0.0213 | 4.25552 | 4.97786 | 0.61958 | 0.77255 | 0.48576 | 0.9551 | | | | |
| 310 | 1.48885 | 4.62485 | 3.17131 | 2.68033 | 4.05066 | 3.04091 | 3.40451 | 3.4543 | 2.65644 | 3.09295 | 3.9287 |
| | 2.68618 | 4.42225 | 2.77519 | 2.73123 | 3.46354 | 2.40513 | 3.72494 | 3.29354 | 2.67741 | 2.69355 | 4.2469 |
| | 0.0213 | 4.25552 | 4.97786 | 0.61958 | 0.77255 | 0.48576 | 0.9551 | | | | |
| 311 | 2.49215 | 5.05184 | 2.76516 | 2.08438 | 4.0596 | 3.41875 | 3.26516 | 3.82102 | 1.93578 | 3.13912 | 4.10278 |
| | 2.68618 | 4.42225 | 2.77519 | 2.73123 | 3.46354 | 2.40513 | 3.72494 | 3.29354 | 2.67741 | 2.69355 | 4.2469 |
| | 0.0213 | 4.25552 | 4.97786 | 0.61958 | 0.77255 | 0.48576 | 0.9551 | | | | |
| 312 | 2.04528 | 4.60312 | 3.18634 | 2.2123 | 3.45106 | 3.50912 | 3.73276 | 2.93956 | 2.55287 | 2.83819 | 3.53467 |
| | 2.68618 | 4.42225 | 2.77519 | 2.73123 | 3.46354 | 2.40513 | 3.72494 | 3.29354 | 2.67741 | 2.69355 | 4.2469 |
| | 0.0213 | 4.25552 | 4.97786 | 0.61958 | 0.77255 | 0.48576 | 0.9551 | | | | |
| 313 | 3.03702 | 4.41534 | 4.68468 | 4.09869 | 2.27125 | 4.21502 | 4.4876 | 2.28531 | 3.95381 | 1.15138 | 2.37605 |
| | 2.68618 | 4.42225 | 2.77519 | 2.73123 | 3.46354 | 2.40513 | 3.72494 | 3.29354 | 2.67741 | 2.69355 | 4.2469 |
| | 0.0213 | 4.25552 | 4.97786 | 0.61958 | 0.77255 | 0.48576 | 0.9551 | | | | |
| 314 | 2.6119 | 3.63327 | 3.62377 | 3.37861 | 2.5622 | 3.49887 | 3.47755 | 2.42549 | 3.27565 | 1.96822 | 3.23485 |
| | 2.68618 | 4.42225 | 2.77519 | 2.73123 | 3.46354 | 2.40513 | 3.72494 | 3.29354 | 2.67741 | 2.69355 | 4.2469 |
| | 0.0213 | 4.25552 | 4.97786 | 0.61958 | 0.77255 | 0.48576 | 0.9551 | | | | |
| 315 | 2.28546 | 5.04925 | 2.56222 | 2.25888 | 4.35344 | 2.61914 | 3.61991 | 3.81188 | 2.23696 | 3.23931 | 3.77034 |
| | 2.68618 | 4.42225 | 2.77519 | 2.73123 | 3.46354 | 2.40513 | 3.72494 | 3.29354 | 2.67741 | 2.69355 | 4.2469 |
| | 0.0213 | 4.25552 | 4.97786 | 0.61958 | 0.77255 | 0.48576 | 0.9551 | | | | |
| 316 | 2.47485 | 4.83268 | 2.62191 | 2.37539 | 3.74481 | 3.45585 | 3.65933 | 3.32098 | 2.36128 | 2.99025 | 3.66378 |
| | 2.68618 | 4.42225 | 2.77519 | 2.73123 | 3.46354 | 2.40513 | 3.72494 | 3.29354 | 2.67741 | 2.69355 | 4.2469 |
| | 0.0213 | 4.25552 | 4.97786 | 0.61958 | 0.77255 | 0.48576 | 0.9551 | | | | |
| 317 | 2.84582 | 4.35412 | 4.78015 | 4.22282 | 3.50189 | 4.32789 | 4.74582 | 1.48701 | 4.10394 | 1.99785 | 2.82026 |
| | 2.68618 | 4.42225 | 2.77519 | 2.73123 | 3.46354 | 2.40513 | 3.72494 | 3.29354 | 2.67741 | 2.69355 | 4.2469 |
| | 0.0213 | 4.25552 | 4.97786 | 0.61958 | 0.77255 | 0.48576 | 0.9551 | | | | |
| 318 | 2.62206 | 5.18306 | 3.10741 | 2.36818 | 4.56173 | 3.37691 | 3.67375 | 3.96898 | 1.31727 | 3.45275 | 4.25939 |
| | 2.68618 | 4.42225 | 2.77519 | 2.73123 | 3.46354 | 2.40513 | 3.72494 | 3.29354 | 2.67741 | 2.69355 | 4.2469 |
| | 0.0213 | 4.25552 | 4.97786 | 0.61958 | 0.77255 | 0.48576 | 0.9551 | | | | |
| 319 | 2.70932 | 5.37526 | 1.70108 | 2.04734 | 4.68991 | 3.18323 | 3.73043 | 4.18785 | 2.21964 | 3.6687 | 4.44623 |
| | 2.68618 | 4.42225 | 2.77519 | 2.73123 | 3.46354 | 2.40513 | 3.72494 | 3.29354 | 2.67741 | 2.69355 | 4.2469 |
| | 0.0213 | 4.25552 | 4.97786 | 0.61958 | 0.77255 | 0.48576 | 0.9551 | | | | |
| 320 | 3.62982 | 4.93341 | 4.85945 | 4.50271 | 0.83157 | 4.53425 | 4.0598 | 2.82803 | 4.33088 | 1.89623 | 3.49824 |
| | 2.68618 | 4.42225 | 2.77519 | 2.73123 | 3.46354 | 2.40513 | 3.72494 | 3.29354 | 2.67741 | 2.69355 | 4.2469 |
| | 0.0213 | 4.25552 | 4.97786 | 0.61958 | 0.77255 | 0.48576 | 0.9551 | | | | |
| 321 | 3.20608 | 4.49457 | 5.03968 | 4.48609 | 3.10426 | 4.56281 | 4.97505 | 1.17306 | 4.36945 | 1.80697 | 2.84859 |
| | 2.68618 | 4.42225 | 2.77519 | 2.73123 | 3.46354 | 2.40513 | 3.72494 | 3.29354 | 2.67741 | 2.69355 | 4.2469 |
| | 0.0213 | 4.25552 | 4.97786 | 0.61958 | 0.77255 | 0.48576 | 0.9551 | | | | |
| 322 | 2.54797 | 4.44994 | 3.03683 | 2.77665 | 3.20753 | 3.55489 | 3.79261 | 2.81898 | 2.6619 | 2.3977 | 3.33032 |
| | 2.68618 | 4.42225 | 2.77519 | 2.73123 | 3.46354 | 2.40513 | 3.72494 | 3.29354 | 2.67741 | 2.69355 | 4.2469 |
| | 0.09568 | 4.25552 | 2.56321 | 0.61958 | 0.77255 | 0.48576 | 0.9551 | | | | |
| 323 | 2.61023 | 4.48456 | 2.85053 | 2.3202 | 4.11292 | 3.13072 | 3.63847 | 3.53709 | 2.42654 | 2.86095 | 3.92985 |
| | 2.68618 | 4.42225 | 2.77519 | 2.73123 | 3.46354 | 2.40513 | 3.72494 | 3.29354 | 2.67741 | 2.69355 | 4.2469 |
| | 0.11838 | 4.18277 | 2.33941 | 0.61958 | 0.77255 | 0.57559 | 0.82639 | | | | |
| 324 | 2.50346 | 3.4029 | 3.58408 | 3.01411 | 3.07703 | 3.31546 | 3.36398 | 2.61861 | 2.95275 | 2.26352 | 3.32498 |
| | 2.68618 | 4.42225 | 2.77519 | 2.73123 | 3.46354 | 2.40513 | 3.72494 | 3.29354 | 2.67741 | 2.69355 | 4.2469 |
| | 0.04406 | 4.08958 | 3.63611 | 0.61958 | 0.77255 | 0.67207 | 0.71468 | | | | |
| 325 | 2.42738 | 4.29616 | 2.8301 | 2.29943 | 4.05943 | 3.40536 | 3.61058 | 3.4806 | 2.27795 | 2.86682 | 3.88189 |
| | 2.68618 | 4.42225 | 2.77519 | 2.73123 | 3.46354 | 2.40513 | 3.72494 | 3.29354 | 2.67741 | 2.69355 | 4.2469 |
| | 0.11452 | 4.07119 | 2.39524 | 0.61958 | 0.77255 | 0.68908 | 0.69723 | | | | |
| 326 | 2.42393 | 4.73588 | 2.98431 | 2.43896 | 3.97462 | 3.40392 | 3.36831 | 3.25716 | 2.3385 | 2.99583 | 3.81855 |
| | 2.68591 | 4.42227 | 2.77528 | 2.73142 | 3.46372 | 2.40515 | 3.72484 | 3.29372 | 2.67741 | 2.69361 | 4.24532 |
| | 0.44569 | 1.02272 | * | 1.71775 | 0.1978 | 0 | * | | | | |

| HMM | N | P | Q | R | S | T | V | W | Y | |
|---|---|---|---|---|---|---|---|---|---|---|
| COMPO | 3.08332 | 3.16278 | 3.14933 | 2.95336 | 2.65169 | 2.88483 | 2.59999 | 4.67957 | 3.50072 | |
| | 2.90385 | 2.73746 | 3.18155 | 2.8983 | 2.3788 | 2.77503 | 2.98538 | 4.5849 | 3.61529 | |
| 1 | 2.88526 | 3.77642 | 2.57955 | 2.68167 | 2.4586 | 2.8237 | 3.21688 | 5.34464 | 3.99892 | 28 -- |
| | 2.90347 | 2.73739 | 3.18146 | 2.89801 | 2.37887 | 2.77519 | 2.98518 | 4.58477 | 3.61503 | |
| 2 | 2.70284 | 3.77638 | 2.72661 | 2.75666 | 2.59095 | 2.67365 | 3.19345 | 5.33953 | 3.98699 | 29 -- |
| | 2.90347 | 2.73739 | 3.18146 | 2.89801 | 2.37887 | 2.77519 | 2.98518 | 4.58477 | 3.61503 | |
| 3 | 2.87196 | 3.77565 | 2.39793 | 2.815 | 2.44517 | 2.82406 | 3.3054 | 5.41452 | 4.04333 | 30 -- |
| | 2.90347 | 2.73739 | 3.18146 | 2.89801 | 2.37887 | 2.77519 | 2.98518 | 4.58477 | 3.61503 | |
| 4 | 2.71561 | 3.83423 | 2.82061 | 2.93237 | 2.14826 | 2.68914 | 3.08385 | 5.2736 | 3.70913 | 31 -- |
| | 2.90347 | 2.73739 | 3.18146 | 2.89801 | 2.37887 | 2.77519 | 2.98518 | 4.58477 | 3.61503 | |
| 5 | 2.89654 | 3.20085 | 2.82089 | 2.74045 | 2.24849 | 2.66127 | 2.99154 | 4.57462 | 3.93097 | 32 -- |
| | 2.90347 | 2.73739 | 3.18146 | 2.89801 | 2.37887 | 2.77519 | 2.98518 | 4.58477 | 3.61503 | |
| 6 | 2.92122 | 3.28543 | 2.74721 | 2.86991 | 2.27246 | 2.50614 | 3.26999 | 5.40172 | 3.76473 | 33 -- |
| | 2.90347 | 2.73739 | 3.18146 | 2.89801 | 2.37887 | 2.77519 | 2.98518 | 4.58477 | 3.61503 | |
| 7 | 2.94258 | 2.67641 | 2.76522 | 2.76329 | 2.44021 | 2.84398 | 3.21693 | 5.3636 | 4.01506 | 34 -- |
| | 2.90347 | 2.73739 | 3.18146 | 2.89801 | 2.37887 | 2.77519 | 2.98518 | 4.58477 | 3.61503 | |
| 8 | 2.98477 | 2.35337 | 3.01053 | 3.08784 | 2.39118 | 2.58194 | 2.85901 | 5.13831 | 3.86638 | 35 -- |
| | 2.90347 | 2.73739 | 3.18146 | 2.89801 | 2.37887 | 2.77519 | 2.98518 | 4.58477 | 3.61503 | |
| 9 | 2.88639 | 2.42343 | 2.95167 | 3.03777 | 2.341 | 2.68781 | 2.89365 | 5.14493 | 3.8625 | 36 -- |
| | 2.90347 | 2.73739 | 3.18146 | 2.89801 | 2.37887 | 2.77519 | 2.98518 | 4.58477 | 3.61503 | |
| 10 | 2.68838 | 3.65725 | 2.96097 | 3.04353 | 2.36538 | 2.66847 | 2.67898 | 5.0936 | 3.81758 | 37 -- |
| | 2.90347 | 2.73739 | 3.18146 | 2.89801 | 2.37887 | 2.77519 | 2.98518 | 4.58477 | 3.61503 | |
| 11 | 3.3176 | 3.71261 | 3.16728 | 3.22162 | 2.40915 | 2.54589 | 2.42603 | 4.9238 | 3.68765 | 38 -- |
| | 2.90353 | 2.73746 | 3.18143 | 2.89807 | 2.37872 | 2.7751 | 2.98525 | 4.58483 | 3.6151 | |
| 12 | 2.60435 | 3.85767 | 2.72752 | 2.99753 | 2.6133 | 2.98557 | 3.55449 | 5.64272 | 4.23457 | 42 -- |
| | 2.90347 | 2.73739 | 3.18146 | 2.89801 | 2.37887 | 2.77519 | 2.98518 | 4.58477 | 3.61503 | |
| 13 | 3.28197 | 1.87242 | 3.16811 | 3.21784 | 2.47704 | 2.71377 | 2.79721 | 5.13677 | 3.88114 | 43 -- |
| | 2.90347 | 2.73739 | 3.18146 | 2.89801 | 2.37887 | 2.77519 | 2.98518 | 4.58477 | 3.61503 | |
| 14 | 2.84662 | 4.04913 | 3.23302 | 3.29664 | 2.92174 | 2.76367 | 2.78865 | 4.68319 | 1.71492 | 44 -- |
| | 2.90347 | 2.73739 | 3.18146 | 2.89801 | 2.37887 | 2.77519 | 2.98518 | 4.58477 | 3.61503 | |
| 15 | 2.84293 | 3.81574 | 2.59821 | 2.84826 | 2.62004 | 2.70016 | 3.43852 | 5.51887 | 4.12974 | 45 -- |
| | 2.90347 | 2.73739 | 3.18146 | 2.89801 | 2.37887 | 2.77519 | 2.98518 | 4.58477 | 3.61503 | |
| 16 | 3.46769 | 4.017 | 3.10192 | 3.19369 | 2.71875 | 2.84504 | 2.48514 | 4.78972 | 2.68075 | 46 -- |
| | 2.90347 | 2.73739 | 3.18146 | 2.89801 | 2.37887 | 2.77519 | 2.98518 | 4.58477 | 3.61503 | |
| 17 | 4.42048 | 4.60519 | 4.20951 | 4.19678 | 3.67927 | 3.35684 | 2.26569 | 5.04843 | 3.94788 | 47 -- |
| | 2.90347 | 2.73739 | 3.18146 | 2.89801 | 2.37887 | 2.77519 | 2.98518 | 4.58477 | 3.61503 | |
| 18 | 2.26103 | 3.84465 | 2.35167 | 2.72161 | 2.6768 | 2.94597 | 3.55173 | 5.59702 | 4.20735 | 48 -- |
| | 2.90347 | 2.73739 | 3.18146 | 2.89801 | 2.37887 | 2.77519 | 2.98518 | 4.58477 | 3.61503 | |
| 19 | 4.69285 | 4.81072 | 4.46598 | 4.46288 | 3.9533 | 3.51676 | 2.04961 | 5.25471 | 4.16887 | 49 -- |
| | 2.90347 | 2.73739 | 3.18146 | 2.89801 | 2.37887 | 2.77519 | 2.98518 | 4.58477 | 3.61503 | |
| 20 | 3.16016 | 3.96901 | 3.14643 | 2.91147 | 2.83107 | 2.30885 | 1.91662 | 4.96154 | 3.72256 | 50 -- |
| | 2.90347 | 2.73739 | 3.18146 | 2.89801 | 2.37887 | 2.77519 | 2.98518 | 4.58477 | 3.61503 | |
| 21 | 2.86197 | 3.35797 | 2.54337 | 2.77232 | 2.57082 | 2.85898 | 2.93104 | 5.26768 | 3.57153 | 51 -- |
| | 2.90347 | 2.73739 | 3.18146 | 2.89801 | 2.37887 | 2.77519 | 2.98518 | 4.58477 | 3.61503 | |
| 22 | 1.09296 | 3.95591 | 3.10731 | 3.39798 | 2.87684 | 3.00121 | 3.76878 | 5.92587 | 4.48837 | 52 -- |
| | 2.90347 | 2.73739 | 3.18146 | 2.89801 | 2.37887 | 2.77519 | 2.98518 | 4.58477 | 3.61503 | |
| 23 | 3.41693 | 1.03535 | 3.62679 | 3.62343 | 2.32477 | 2.9145 | 3.3638 | 5.8367 | 4.60374 | 53 -- |
| | 2.90347 | 2.73739 | 3.18146 | 2.89801 | 2.37887 | 2.77519 | 2.98518 | 4.58477 | 3.61503 | |
| 24 | 2.31166 | 3.97877 | 2.74169 | 3.54121 | 2.96954 | 3.38833 | 4.08478 | 6.1513 | 4.62343 | 54 -- |
| | 2.90347 | 2.73739 | 3.18146 | 2.89801 | 2.37887 | 2.77519 | 2.98518 | 4.58477 | 3.61503 | |
| 25 | 3.24288 | 3.91384 | 3.49669 | 3.68531 | 2.70827 | 3.04789 | 3.53763 | 5.92879 | 4.64662 | 55 -- |
| | 2.90341 | 2.7374 | 3.18147 | 2.89802 | 2.37888 | 2.7752 | 2.98519 | 4.58478 | 3.61504 | |
| 26 | 3.44969 | 3.8508 | 3.61161 | 3.6115 | 1.17415 | 1.65554 | 3.28065 | 5.76893 | 4.54493 | 57 -- |
| | 2.90347 | 2.73739 | 3.18146 | 2.89801 | 2.37887 | 2.77519 | 2.98518 | 4.58477 | 3.61503 | |
| 27 | 4.3877 | 4.58506 | 4.25882 | 4.2067 | 3.62501 | 3.26538 | 1.61066 | 5.10383 | 3.9568 | 58 -- |
| | 2.90347 | 2.73739 | 3.18146 | 2.89801 | 2.37887 | 2.77519 | 2.98518 | 4.58477 | 3.61503 | |
| 28 | 3.68528 | 4.05006 | 3.70235 | 3.66054 | 2.83531 | 1.18295 | 2.47321 | 5.29233 | 4.08047 | 59 -- |
| | 2.90347 | 2.73739 | 3.18146 | 2.89801 | 2.37887 | 2.77519 | 2.98518 | 4.58477 | 3.61503 | |
| 29 | 3.35021 | 4.08577 | 2.98303 | 1.07934 | 3.01372 | 3.17012 | 3.3723 | 5.43114 | 4.22778 | 60 -- |
| | 2.90347 | 2.73739 | 3.18146 | 2.89801 | 2.37887 | 2.77519 | 2.98518 | 4.58477 | 3.61503 | |
| 30 | 2.45453 | 3.01529 | 2.68525 | 2.72231 | 2.54764 | 2.85265 | 3.13332 | 5.39381 | 3.54934 | 61 -- |
| | 2.90347 | 2.73739 | 3.18146 | 2.89801 | 2.37887 | 2.77519 | 2.98518 | 4.58477 | 3.61503 | |
| 31 | 3.37178 | 3.54244 | 3.22706 | 3.12501 | 2.30812 | 2.59326 | 2.41278 | 4.87497 | 3.46753 | 62 -- |
| | 2.90347 | 2.73739 | 3.18146 | 2.89801 | 2.37887 | 2.77519 | 2.98518 | 4.58477 | 3.61503 | |
| 32 | 2.86463 | 3.26325 | 2.75733 | 2.87797 | 2.53839 | 2.52978 | 3.04053 | 5.40629 | 4.04675 | 63 -- |
| | 2.90347 | 2.73739 | 3.18146 | 2.89801 | 2.37887 | 2.77519 | 2.98518 | 4.58477 | 3.61503 | |
| 33 | 3.33944 | 4.00499 | 3.33155 | 3.22215 | 2.81222 | 2.72251 | 2.29236 | 4.22539 | 3.57862 | 64 -- |
| | 2.90349 | 2.73741 | 3.18148 | 2.89803 | 2.37889 | 2.77521 | 2.9852 | 4.58479 | 3.61473 | |
| 34 | 3.4287 | 0.97749 | 3.55495 | 3.4574 | 2.55956 | 3.02233 | 3.29902 | 5.63307 | 4.32568 | 66 -- |
| | 2.90347 | 2.73739 | 3.18146 | 2.89801 | 2.37887 | 2.77519 | 2.98518 | 4.58477 | 3.61503 | |
| 35 | 2.89322 | 3.87297 | 2.87907 | 2.76566 | 2.32019 | 2.42136 | 2.93327 | 5.22699 | 3.72907 | 67 -- |
| | 2.90347 | 2.73739 | 3.18146 | 2.89801 | 2.37887 | 2.77519 | 2.98518 | 4.58477 | 3.61503 | |
| 36 | 3.79101 | 4.20865 | 3.68813 | 3.66223 | 2.84069 | 2.38331 | 1.60478 | 4.93301 | 3.73293 | 68 -- |
| | 2.90347 | 2.73739 | 3.18146 | 2.89801 | 2.37887 | 2.77519 | 2.98518 | 4.58477 | 3.61503 | |
| 37 | 2.80195 | 2.31234 | 2.72429 | 2.9174 | 2.46453 | 2.87979 | 3.10901 | 5.41707 | 3.59287 | 69 -- |
| | 2.90347 | 2.73739 | 3.18146 | 2.89801 | 2.37887 | 2.77519 | 2.98518 | 4.58477 | 3.61503 | |
| 38 | 3.06737 | 2.59171 | 2.9065 | 3.00522 | 2.50811 | 2.64073 | 3.02249 | 5.2473 | 3.94336 | 70 -- |
| | 2.90347 | 2.73739 | 3.18146 | 2.89801 | 2.37887 | 2.77519 | 2.98518 | 4.58477 | 3.61503 | |
| 39 | 2.59889 | 3.49951 | 2.78908 | 2.91986 | 2.22144 | 2.21088 | 3.13513 | 5.45757 | 4.09404 | 71 -- |
| | 2.90347 | 2.73739 | 3.18146 | 2.89801 | 2.37887 | 2.77519 | 2.98518 | 4.58477 | 3.61503 | |
| 40 | 2.92785 | 2.04062 | 2.83067 | 2.99006 | 2.60202 | 2.93714 | 3.38754 | 5.52462 | 4.15156 | 72 -- |
| | 2.9034 | 2.73742 | 3.18149 | 2.89803 | 2.37889 | 2.77516 | 2.98521 | 4.58479 | 3.61505 | |
| 41 | 2.56911 | 3.81999 | 2.52532 | 2.90012 | 2.4293 | 2.62251 | 3.50604 | 5.58015 | 4.17583 | 74 -- |
| | 2.90347 | 2.73739 | 3.18146 | 2.89801 | 2.37887 | 2.77519 | 2.98518 | 4.58477 | 3.61503 | |
| 42 | 3.21273 | 2.46219 | 3.05297 | 3.12543 | 2.6968 | 2.67956 | 2.73819 | 4.42919 | 3.76111 | 75 -- |
| | 2.90347 | 2.73739 | 3.18146 | 2.89801 | 2.37887 | 2.77519 | 2.98518 | 4.58477 | 3.61503 | |
| 43 | 2.84648 | 3.85435 | 2.8428 | 2.95258 | 2.33051 | 2.3019 | 2.93967 | 5.27965 | 3.95863 | 76 -- |
| | 2.90347 | 2.73739 | 3.18146 | 2.89801 | 2.37887 | 2.77519 | 2.98518 | 4.58477 | 3.61503 | |
| 44 | 3.05565 | 2.52958 | 2.90885 | 2.98981 | 2.52861 | 2.44056 | 2.98637 | 5.21884 | 3.92272 | 77 -- |
| | 2.90347 | 2.73739 | 3.18146 | 2.89801 | 2.37887 | 2.77519 | 2.98518 | 4.58477 | 3.61503 | |
| 45 | 2.90966 | 3.58965 | 2.5829 | 2.87367 | 2.51928 | 2.63962 | 2.89759 | 5.38935 | 4.03054 | 78 -- |
| | 2.90347 | 2.73739 | 3.18146 | 2.89801 | 2.37887 | 2.77519 | 2.98518 | 4.58477 | 3.61503 | |
| 46 | 2.85028 | 3.83265 | 2.84622 | 2.94179 | 2.24496 | 2.60631 | 2.99409 | 5.20732 | 3.90003 | 79 -- |
| | 2.90352 | 2.73752 | 3.18113 | 2.89783 | 2.37895 | 2.77528 | 2.98514 | 4.58489 | 3.61515 | |
| 47 | 3.17979 | 2.56646 | 3.02797 | 2.86056 | 2.51903 | 2.75422 | 2.45651 | 5.078 | 3.81545 | 90 -- |
| | 2.90347 | 2.73739 | 3.18146 | 2.89801 | 2.37887 | 2.77519 | 2.98518 | 4.58477 | 3.61503 | |
| 48 | 3.55442 | 4.02663 | 3.49007 | 3.49924 | 2.50411 | 2.61715 | 1.66485 | 5.06123 | 3.84746 | 91 -- |
| | 2.90347 | 2.73739 | 3.18146 | 2.89801 | 2.37887 | 2.77519 | 2.98518 | 4.58477 | 3.61503 | |
| 49 | 3.57365 | 3.75431 | 3.45089 | 3.43793 | 2.84026 | 2.84365 | 2.03333 | 4.74524 | 3.53179 | 92 -- |
| | 2.90347 | 2.73739 | 3.18146 | 2.89801 | 2.37887 | 2.77519 | 2.98518 | 4.58477 | 3.61503 | |
| 50 | 3.36238 | 3.9572 | 3.24808 | 3.28933 | 1.67148 | 2.44429 | 2.68687 | 4.99283 | 3.74412 | 93 -- |
| | 2.90347 | 2.73739 | 3.18146 | 2.89801 | 2.37887 | 2.77519 | 2.98518 | 4.58477 | 3.61503 | |
| 51 | 3.22619 | 4.08215 | 2.87597 | 2.21843 | 2.68804 | 3.24395 | 3.70322 | 5.58826 | 4.37283 | 94 -- |
| | 2.90347 | 2.73739 | 3.18146 | 2.89801 | 2.37887 | 2.77519 | 2.98518 | 4.58477 | 3.61503 | |
| 52 | 3.23153 | 4.23051 | 3.58785 | 4.05877 | 3.38503 | 3.807 | 4.31921 | 6.11573 | 4.86017 | 95 -- |
| | 2.90347 | 2.73739 | 3.18146 | 2.89801 | 2.37887 | 2.77519 | 2.98518 | 4.58477 | 3.61503 | |
| 53 | 4.85534 | 4.99585 | 4.76643 | 4.71418 | 4.15094 | 3.54705 | 1.3399 | 5.68023 | 4.51296 | 96 -- |
| | 2.90347 | 2.73739 | 3.18146 | 2.89801 | 2.37887 | 2.77519 | 2.98518 | 4.58477 | 3.61503 | |
| 54 | 3.33015 | 1.65495 | 3.29233 | 3.30509 | 2.57981 | 2.02315 | 2.96046 | 5.38237 | 4.13085 | 97 -- |
| | 2.90347 | 2.73739 | 3.18146 | 2.89801 | 2.37887 | 2.77519 | 2.98518 | 4.58477 | 3.61503 | |
| 55 | 4.3535 | 4.59007 | 4.17656 | 4.1455 | 3.63988 | 3.32576 | 2.02158 | 5.05775 | 3.28703 | 98 -- |
| | 2.90347 | 2.73739 | 3.18146 | 2.89801 | 2.37887 | 2.77519 | 2.98518 | 4.58477 | 3.61503 | |
| 56 | 1.17295 | 3.95122 | 3.07197 | 3.43674 | 2.63178 | 3.26288 | 3.87679 | 5.99392 | 4.52402 | 99 -- |
| | 2.90347 | 2.73739 | 3.18146 | 2.89801 | 2.37887 | 2.77519 | 2.98518 | 4.58477 | 3.61503 | |
| 57 | 2.83035 | 2.57555 | 2.61299 | 2.86292 | 2.41236 | 2.77738 | 3.37675 | 5.47857 | 4.10149 | 100 -- |
| | 2.90347 | 2.73739 | 3.18146 | 2.89801 | 2.37887 | 2.77519 | 2.98518 | 4.58477 | 3.61503 | |
| 58 | 2.71628 | 3.82771 | 2.67225 | 2.90065 | 2.18354 | 2.44744 | 3.43486 | 5.5308 | 4.14267 | 101 -- |
| | 2.90347 | 2.73739 | 3.18146 | 2.89801 | 2.37887 | 2.77519 | 2.98518 | 4.58477 | 3.61503 | |
| 59 | 2.15446 | 3.8586 | 2.77846 | 2.81135 | 2.60548 | 2.49122 | 3.43224 | 5.51626 | 4.15469 | 102 -- |
| | 2.90347 | 2.73739 | 3.18146 | 2.89801 | 2.37887 | 2.77519 | 2.98518 | 4.58477 | 3.61503 | |
| 60 | 2.28079 | 3.49617 | 2.58314 | 2.71841 | 2.39751 | 2.9076 | 3.4994 | 5.56104 | 4.17059 | 103 -- |
| | 2.90347 | 2.73739 | 3.18146 | 2.89801 | 2.37887 | 2.77519 | 2.98518 | 4.58477 | 3.61503 | |
| 61 | 3.71802 | 4.15047 | 3.69748 | 3.6497 | 2.96409 | 1.21793 | 2.07913 | 5.38663 | 4.15931 | 104 -- |
| | 2.90347 | 2.73739 | 3.18146 | 2.89801 | 2.37887 | 2.77519 | 2.98518 | 4.58477 | 3.61503 | |
| 62 | 3.64365 | 4.14441 | 3.53448 | 3.31142 | 2.79036 | 2.97282 | 2.54734 | 2.09143 | 2.86733 | 105 -- |
| | 2.90347 | 2.73739 | 3.18146 | 2.89801 | 2.37887 | 2.77519 | 2.98518 | 4.58477 | 3.61503 | |
| 63 | 4.1695 | 4.44618 | 4.03353 | 3.99646 | 3.44567 | 3.16814 | 1.71352 | 4.99906 | 3.84857 | 106 -- |
| | 2.90347 | 2.73739 | 3.18146 | 2.89801 | 2.37887 | 2.77519 | 2.98518 | 4.58477 | 3.61503 | |
| 64 | 3.80428 | 4.38334 | 3.395 | 0.52404 | 3.57083 | 3.74393 | 4.02369 | 5.66284 | 4.58903 | 107 -- |
| | 2.90347 | 2.73739 | 3.18146 | 2.89801 | 2.37887 | 2.77519 | 2.98518 | 4.58477 | 3.61503 | |
| 65 | 4.85285 | 4.95471 | 4.618 | 4.61143 | 4.14693 | 3.63253 | 1.87296 | 5.44859 | 4.36767 | 108 -- |
| | 2.90347 | 2.73739 | 3.18146 | 2.89801 | 2.37887 | 2.77519 | 2.98518 | 4.58477 | 3.61503 | |
| 66 | 4.32199 | 4.97763 | 4.42893 | 4.52447 | 4.07852 | 4.24492 | 3.60237 | 3.68802 | 1.07985 | 109 -- |
| | 2.90347 | 2.73739 | 3.18146 | 2.89801 | 2.37887 | 2.77519 | 2.98518 | 4.58477 | 3.61503 | |
| 67 | 3.34726 | 4.00543 | 3.1601 | 2.06091 | 2.87905 | 2.90312 | 2.42108 | 5.00341 | 3.77164 | 110 -- |
| | 2.90347 | 2.73739 | 3.18146 | 2.89801 | 2.37887 | 2.77519 | 2.98518 | 4.58477 | 3.61503 | |
| 68 | 4.16117 | 0.34853 | 4.37081 | 4.1814 | 3.52713 | 3.81811 | 4.09794 | 5.89679 | 4.96637 | 111 -- |
| | 2.90353 | 2.73736 | 3.18153 | 2.89807 | 2.37886 | 2.77453 | 2.98525 | 4.58483 | 3.61509 | |
| 69 | 2.91922 | 3.62255 | 2.83304 | 2.36064 | 2.32803 | 2.49988 | 2.68205 | 5.27818 | 3.96021 | 122 -- |
| | 2.90347 | 2.73739 | 3.18146 | 2.89801 | 2.37887 | 2.77519 | 2.98518 | 4.58477 | 3.61503 | |
| 70 | 2.65101 | 3.62197 | 2.62581 | 2.75273 | 2.45298 | 2.35904 | 3.42085 | 5.50488 | 4.11715 | 123 -- |
| | 2.90348 | 2.73729 | 3.18158 | 2.89806 | 2.37889 | 2.77507 | 2.98525 | 4.58489 | 3.61515 | |
| 71 | 2.93938 | 2.97669 | 2.8543 | 2.96119 | 2.1677 | 2.64104 | 2.96092 | 5.25328 | 3.93857 | 129 -- |
| | 2.90347 | 2.73739 | 3.18146 | 2.89801 | 2.37887 | 2.77519 | 2.98518 | 4.58477 | 3.61503 | |
| 72 | 2.63519 | 2.50877 | 2.85154 | 2.96849 | 2.26531 | 2.86211 | 2.93905 | 5.37748 | 4.04387 | 130 -- |
| | 2.90347 | 2.73739 | 3.18146 | 2.89801 | 2.37887 | 2.77519 | 2.98518 | 4.58477 | 3.61503 | |
| 73 | 2.7498 | 3.04638 | 2.66461 | 2.87439 | 2.26911 | 2.72622 | 3.41714 | 5.51086 | 4.12418 | 131 -- |
| | 2.90347 | 2.73739 | 3.18146 | 2.89801 | 2.37887 | 2.77519 | 2.98518 | 4.58477 | 3.61503 | |
| 74 | 2.41749 | 3.82163 | 2.68319 | 2.68949 | 2.43711 | 2.60391 | 3.13389 | 5.44299 | 4.07585 | 132 -- |
| | 2.90347 | 2.7374 | 3.18147 | 2.89801 | 2.37887 | 2.7752 | 2.98519 | 4.58477 | 3.61503 | |
| 75 | 2.69287 | 3.51207 | 2.79214 | 2.94362 | 2.28079 | 2.15106 | 3.39419 | 5.51747 | 4.13972 | 134 -- |
| | 2.90347 | 2.73739 | 3.18146 | 2.89801 | 2.37887 | 2.77519 | 2.98518 | 4.58477 | 3.61503 | |
| 76 | 2.68228 | 3.81886 | 2.81125 | 2.92549 | 2.40989 | 2.52162 | 2.74556 | 5.33759 | 4.00304 | 135 -- |
| | 2.90347 | 2.73739 | 3.18146 | 2.89801 | 2.37887 | 2.77519 | 2.98518 | 4.58477 | 3.61503 | |
| 77 | 2.57096 | 3.80676 | 2.59612 | 2.73634 | 2.55036 | 2.76065 | 3.28037 | 5.40117 | 4.04464 | 136 -- |
| | 2.90347 | 2.73739 | 3.18146 | 2.89801 | 2.37887 | 2.77519 | 2.98518 | 4.58477 | 3.61503 | |
| 78 | 3.33015 | 4.16424 | 2.83579 | 1.61028 | 3.18173 | 3.34459 | 3.80083 | 5.56718 | 4.41071 | 137 -- |
| | 2.90347 | 2.73739 | 3.18146 | 2.89801 | 2.37887 | 2.77519 | 2.98518 | 4.58477 | 3.61503 | |
| 79 | 4.74816 | 4.91513 | 4.45747 | 4.36509 | 4.11077 | 3.78815 | 2.46198 | 5.28814 | 4.11463 | 138 -- |
| | 2.90347 | 2.73739 | 3.18146 | 2.89801 | 2.37887 | 2.77519 | 2.98518 | 4.58477 | 3.61503 | |
| 80 | 4.16117 | 0.34853 | 4.37081 | 4.1814 | 3.52713 | 3.81811 | 4.09794 | 5.89679 | 4.96637 | 139 -- |
| | 2.90347 | 2.73739 | 3.18146 | 2.89801 | 2.37887 | 2.77519 | 2.98518 | 4.58477 | 3.61503 | |
| 81 | 4.82118 | 4.93963 | 4.64161 | 4.62074 | 4.10683 | 3.57237 | 1.59668 | 5.49178 | 4.38566 | 140 -- |
| | 2.90347 | 2.73739 | 3.18146 | 2.89801 | 2.37887 | 2.77519 | 2.98518 | 4.58477 | 3.61503 | |
| 82 | 4.8407 | 4.97703 | 4.73975 | 4.69276 | 4.13067 | 3.53936 | 1.30674 | 5.63513 | 4.47926 | 141 -- |
| | 2.90347 | 2.73739 | 3.18146 | 2.89801 | 2.37887 | 2.77519 | 2.98518 | 4.58477 | 3.61503 | |
| 83 | 4.83709 | 4.97751 | 4.74739 | 4.6967 | 4.12724 | 3.53168 | 1.1862 | 5.65072 | 4.4873 | 142 -- |
| | 2.90347 | 2.73739 | 3.18146 | 2.89801 | 2.37887 | 2.77519 | 2.98518 | 4.58477 | 3.61503 | |
| 84 | 4.19844 | 4.8896 | 4.26857 | 4.34606 | 3.94889 | 4.12351 | 3.62249 | 3.69146 | 0.77075 | 143 -- |
| | 2.90347 | 2.73739 | 3.18146 | 2.89801 | 2.37887 | 2.77519 | 2.98518 | 4.58477 | 3.61503 | |
| 85 | 4.14156 | 4.57963 | 4.08777 | 4.09382 | 3.59024 | 3.47095 | 2.55469 | 4.13689 | 2.04898 | 144 -- |
| | 2.90347 | 2.73739 | 3.18146 | 2.89801 | 2.37887 | 2.77519 | 2.98518 | 4.58477 | 3.61503 | |
| 86 | 3.79703 | 4.41988 | 3.78638 | 3.48044 | 3.58665 | 3.83775 | 4.00762 | 5.08791 | 3.57711 | 145 -- |
| | 2.90347 | 2.73739 | 3.18146 | 2.89801 | 2.37887 | 2.77519 | 2.98518 | 4.58477 | 3.61503 | |
| 87 | 2.98299 | 3.87953 | 3.59841 | 3.68164 | 2.37665 | 2.97848 | 3.54566 | 5.94883 | 4.67727 | 146 -- |
| | 2.90347 | 2.73739 | 3.18146 | 2.89801 | 2.37887 | 2.77519 | 2.98518 | 4.58477 | 3.61503 | |
| 88 | 3.47564 | 3.88209 | 3.79973 | 3.83632 | 2.10584 | 2.9579 | 3.53501 | 5.98367 | 4.77258 | 147 -- |
| | 2.90347 | 2.73739 | 3.18146 | 2.89801 | 2.37887 | 2.77519 | 2.98518 | 4.58477 | 3.61503 | |
| 89 | 3.50276 | 3.91199 | 3.84058 | 3.85877 | 2.36157 | 3.00557 | 3.56988 | 5.98357 | 4.77492 | 148 -- |
| | 2.90347 | 2.73739 | 3.18146 | 2.89801 | 2.37887 | 2.77519 | 2.98518 | 4.58477 | 3.61503 | |
| 90 | 4.17955 | 4.68714 | 4.18386 | 4.21103 | 3.71458 | 3.67106 | 3.05343 | 3.41345 | 2.00158 | 149 -- |
| | 2.90347 | 2.73739 | 3.18146 | 2.89801 | 2.37887 | 2.77519 | 2.98518 | 4.58477 | 3.61503 | |
| 91 | 4.85527 | 5.00885 | 4.8066 | 4.73913 | 4.1517 | 3.53479 | 0.98865 | 5.76106 | 4.56361 | 150 -- |
| | 2.90347 | 2.73739 | 3.18146 | 2.89801 | 2.37887 | 2.77519 | 2.98518 | 4.58477 | 3.61503 | |
| 92 | 4.67795 | 4.77835 | 4.41049 | 4.41953 | 3.92694 | 3.52994 | 2.08409 | 5.16441 | 4.0988 | 151 -- |
| | 2.90347 | 2.73739 | 3.18146 | 2.89801 | 2.37887 | 2.77519 | 2.98518 | 4.58477 | 3.61503 | |
| 93 | 3.80438 | 4.12233 | 3.71233 | 3.6436 | 2.91929 | 2.85989 | 2.29233 | 4.64543 | 2.76597 | 152 -- |
| | 2.90347 | 2.73739 | 3.18146 | 2.89801 | 2.37887 | 2.77519 | 2.98518 | 4.58477 | 3.61503 | |
| 94 | 3.11761 | 3.549 | 3.00521 | 2.64849 | 1.3011 | 2.96976 | 3.31349 | 5.47545 | 4.16419 | 153 -- |
| | 2.90347 | 2.73739 | 3.18146 | 2.89801 | 2.37887 | 2.77519 | 2.98518 | 4.58477 | 3.61503 | |
| 95 | 3.55524 | 3.22825 | 3.60736 | 3.60762 | 2.7151 | 2.88976 | 1.92445 | 5.3993 | 4.18767 | 154 -- |
| | 2.90347 | 2.73739 | 3.18146 | 2.89801 | 2.37887 | 2.77519 | 2.98518 | 4.58477 | 3.61503 | |
| 96 | 2.81245 | 3.85588 | 2.86602 | 3.0359 | 2.37015 | 2.54389 | 3.41127 | 5.5624 | 4.18993 | 155 -- |
| | 2.90347 | 2.73739 | 3.18146 | 2.89801 | 2.37887 | 2.77519 | 2.98518 | 4.58477 | 3.61503 | |
| 97 | 3.00505 | 3.88038 | 2.90365 | 3.0026 | 2.01908 | 2.29191 | 2.98395 | 5.20707 | 3.90669 | 156 -- |
| | 2.90347 | 2.73739 | 3.18146 | 2.89801 | 2.37887 | 2.77519 | 2.98518 | 4.58477 | 3.61503 | |
| 98 | 3.10978 | 3.17225 | 2.7977 | 2.92585 | 2.58737 | 2.51353 | 2.64506 | 5.14038 | 3.85535 | 157 -- |
| | 2.90347 | 2.73739 | 3.18146 | 2.89801 | 2.37887 | 2.77519 | 2.98518 | 4.58477 | 3.61503 | |
| 99 | 3.13135 | 2.74761 | 3.3607 | 3.37423 | 2.91179 | 2.83996 | 2.40133 | 4.79664 | 3.38073 | 158 -- |
| | 2.90347 | 2.73739 | 3.18146 | 2.89801 | 2.37887 | 2.77519 | 2.98518 | 4.58477 | 3.61503 | |
| 100 | 3.38762 | 4.08133 | 3.49624 | 3.48704 | 2.98482 | 2.87964 | 2.34986 | 4.68835 | 3.18047 | 159 -- |
| | 2.90347 | 2.73739 | 3.18146 | 2.89801 | 2.37887 | 2.77519 | 2.98518 | 4.58477 | 3.61503 | |
| 101 | 2.6908 | 3.9553 | 2.81073 | 3.09238 | 2.8756 | 3.17848 | 3.6561 | 5.65299 | 4.21696 | 160 -- |
| | 2.90347 | 2.73739 | 3.18146 | 2.89801 | 2.37887 | 2.77519 | 2.98518 | 4.58477 | 3.61503 | |
| 102 | 2.60724 | 3.81636 | 2.64977 | 2.69099 | 2.55691 | 2.89531 | 3.36501 | 5.58279 | 4.17662 | 161 -- |
| | 2.90347 | 2.73739 | 3.18146 | 2.89801 | 2.37887 | 2.77519 | 2.98518 | 4.58477 | 3.61503 | |
| 103 | 3.38285 | 3.58741 | 3.24051 | 3.27861 | 2.63286 | 2.43026 | 2.56784 | 4.88648 | 3.65982 | 162 -- |
| | 2.90347 | 2.73739 | 3.18146 | 2.89801 | 2.37887 | 2.77519 | 2.98518 | 4.58477 | 3.61503 | |
| 104 | 4.41326 | 4.36592 | 4.69189 | 4.41124 | 3.37594 | 3.60566 | 3.39326 | 5.76248 | 4.73113 | 163 -- |
| | 2.90347 | 2.73739 | 3.18146 | 2.89801 | 2.37887 | 2.77519 | 2.98518 | 4.58477 | 3.61503 | |
| 105 | 2.74926 | 3.85078 | 2.82322 | 2.84007 | 2.14234 | 2.62463 | 3.04237 | 5.32817 | 3.99619 | 164 -- |
| | 2.90347 | 2.73739 | 3.18146 | 2.89801 | 2.37887 | 2.77519 | 2.98518 | 4.58477 | 3.61503 | |
| 106 | 2.54258 | 3.8109 | 2.56533 | 2.65835 | 2.39343 | 2.86594 | 3.29187 | 5.51768 | 3.78882 | 165 -- |
| | 2.90347 | 2.73739 | 3.18146 | 2.89801 | 2.37887 | 2.77519 | 2.98518 | 4.58477 | 3.61503 | |
| 107 | 3.70816 | 4.11671 | 3.58904 | 3.20257 | 3.0367 | 2.88616 | 2.17949 | 4.75507 | 3.56539 | 166 -- |
| | 2.90347 | 2.73739 | 3.18146 | 2.89801 | 2.37887 | 2.77519 | 2.98518 | 4.58477 | 3.61503 | |
| 108 | 3.50317 | 3.82571 | 3.74934 | 3.77795 | 1.83581 | 2.83574 | 3.334 | 5.85879 | 4.66988 | 167 -- |
| | 2.90347 | 2.73739 | 3.18146 | 2.89801 | 2.37887 | 2.77519 | 2.98518 | 4.58477 | 3.61503 | |
| 109 | 2.92361 | 3.82503 | 2.75196 | 2.67917 | 2.27334 | 2.58943 | 3.21968 | 5.47124 | 4.09825 | 168 -- |
| | 2.90347 | 2.73739 | 3.18146 | 2.89801 | 2.37887 | 2.77519 | 2.98518 | 4.58477 | 3.61503 | |
| 110 | 2.74215 | 3.81339 | 2.52207 | 2.76166 | 2.55736 | 2.80216 | 3.52093 | 5.57672 | 4.17124 | 169 -- |
| | 2.90347 | 2.73739 | 3.18146 | 2.89801 | 2.37887 | 2.77519 | 2.98518 | 4.58477 | 3.61503 | |
| 111 | 3.84841 | 4.19881 | 3.74635 | 3.69846 | 2.87972 | 2.82099 | 1.98318 | 4.80657 | 3.61938 | 170 -- |
| | 2.90347 | 2.73739 | 3.18146 | 2.89801 | 2.37887 | 2.77519 | 2.98518 | 4.58477 | 3.61503 | |
| 112 | 2.76246 | 2.12847 | 2.59942 | 2.91244 | 2.6841 | 2.78697 | 3.01012 | 5.36499 | 4.03038 | 171 -- |
| | 2.90347 | 2.73739 | 3.18146 | 2.89801 | 2.37887 | 2.77519 | 2.98518 | 4.58477 | 3.61503 | |
| 113 | 3.49762 | 3.92745 | 3.52287 | 3.53044 | 2.53195 | 2.4909 | 2.45812 | 5.38823 | 4.17148 | 172 -- |
| | 2.90347 | 2.73739 | 3.18146 | 2.89801 | 2.37887 | 2.77519 | 2.98518 | 4.58477 | 3.61503 | |
| 114 | 4.82865 | 4.96286 | 4.71561 | 4.67274 | 4.11561 | 3.53719 | 1.31626 | 5.60027 | 4.4533 | 173 -- |
| | 2.90347 | 2.73739 | 3.18146 | 2.89801 | 2.37887 | 2.77519 | 2.98518 | 4.58477 | 3.61503 | |
| 115 | 4.69765 | 4.90403 | 4.6244 | 4.55898 | 3.99966 | 3.48691 | 0.83238 | 5.65286 | 4.45953 | 174 -- |
| | 2.90347 | 2.73739 | 3.18146 | 2.89801 | 2.37887 | 2.77519 | 2.98518 | 4.58477 | 3.61503 | |
| 116 | 4.10739 | 4.45305 | 4.00681 | 3.97547 | 3.42443 | 3.15654 | 1.32925 | 5.13801 | 3.94577 | 175 -- |
| | 2.90347 | 2.73739 | 3.18146 | 2.89801 | 2.37887 | 2.77519 | 2.98518 | 4.58477 | 3.61503 | |
| 117 | 3.59408 | 3.96657 | 3.86868 | 3.8086 | 0.63275 | 3.06292 | 3.52165 | 5.8339 | 4.58201 | 176 -- |
| | 2.90347 | 2.73739 | 3.18146 | 2.89801 | 2.37887 | 2.77519 | 2.98518 | 4.58477 | 3.61503 | |
| 118 | 3.89844 | 3.42511 | 3.81453 | 3.76874 | 3.2146 | 3.07657 | 1.24673 | 5.12779 | 3.92641 | 177 -- |
| | 2.90347 | 2.73739 | 3.18146 | 2.89801 | 2.37887 | 2.77519 | 2.98518 | 4.58477 | 3.61503 | |
| 119 | 2.82335 | 3.91826 | 2.9346 | 3.26 | 2.4225 | 3.19029 | 3.85503 | 5.92312 | 4.45098 | 178 -- |
| | 2.90347 | 2.73739 | 3.18146 | 2.89801 | 2.37887 | 2.77519 | 2.98518 | 4.58477 | 3.61503 | |
| 120 | 4.22841 | 4.76709 | 4.30182 | 4.19058 | 3.93922 | 4.14006 | 3.70116 | 4.07146 | 0.50853 | 179 -- |
| | 2.90347 | 2.73739 | 3.18146 | 2.89801 | 2.37887 | 2.77519 | 2.98518 | 4.58477 | 3.61503 | |
| 121 | 3.80428 | 4.38334 | 3.395 | 0.52404 | 3.57083 | 3.74393 | 4.02369 | 5.66284 | 4.58903 | 180 -- |
| | 2.90347 | 2.73739 | 3.18146 | 2.89801 | 2.37887 | 2.77519 | 2.98518 | 4.58477 | 3.61503 | |
| 122 | 3.47596 | 4.39885 | 3.84479 | 3.64 | 3.36982 | 3.35845 | 2.62714 | 5.07894 | 3.73532 | 181 -- |
| | 2.90347 | 2.73739 | 3.18146 | 2.89801 | 2.37887 | 2.77519 | 2.98518 | 4.58477 | 3.61503 | |
| 123 | 3.63145 | 3.35531 | 3.86142 | 3.82119 | 2.55547 | 2.83994 | 3.09539 | 5.71638 | 4.54426 | 182 -- |
| | 2.90347 | 2.73739 | 3.18146 | 2.89801 | 2.37887 | 2.77519 | 2.98518 | 4.58477 | 3.61503 | |
| 124 | 4.16117 | 0.34853 | 4.37081 | 4.1814 | 3.52713 | 3.81811 | 4.09794 | 5.89679 | 4.96637 | 183 -- |
| | 2.90347 | 2.73739 | 3.18146 | 2.89801 | 2.37887 | 2.77519 | 2.98518 | 4.58477 | 3.61503 | |
| 125 | 2.97912 | 4.01507 | 3.13217 | 3.28924 | 2.97306 | 3.03134 | 3.73254 | 5.91984 | 4.52338 | 184 -- |
| | 2.90347 | 2.73739 | 3.18146 | 2.89801 | 2.37887 | 2.77519 | 2.98518 | 4.58477 | 3.61503 | |
| 126 | 2.3743 | 3.93517 | 2.90644 | 2.95964 | 2.83402 | 3.11751 | 3.60861 | 5.64573 | 4.25002 | 185 -- |
| | 2.90347 | 2.73739 | 3.18146 | 2.89801 | 2.37887 | 2.77519 | 2.98518 | 4.58477 | 3.61503 | |
| 127 | 3.43138 | 4.23481 | 2.91635 | 0.88496 | 3.31059 | 3.46196 | 3.87023 | 5.59281 | 4.47237 | 186 -- |
| | 2.90347 | 2.73739 | 3.18146 | 2.89801 | 2.37887 | 2.77519 | 2.98518 | 4.58477 | 3.61503 | |
| 128 | 4.70297 | 4.84509 | 4.50218 | 4.33521 | 4.10816 | 3.89905 | 2.70402 | 5.33025 | 4.13656 | 187 -- |
| | 2.90347 | 2.73739 | 3.18146 | 2.89801 | 2.37887 | 2.77519 | 2.98518 | 4.58477 | 3.61503 | |
| 129 | 4.16117 | 0.34853 | 4.37081 | 4.1814 | 3.52713 | 3.81811 | 4.09794 | 5.89679 | 4.96637 | 188 -- |
| | 2.90347 | 2.73739 | 3.18146 | 2.89801 | 2.37887 | 2.77519 | 2.98518 | 4.58477 | 3.61503 | |
| 130 | 3.76814 | 4.02005 | 4.06612 | 3.9693 | 2.7862 | 3.09112 | 3.25386 | 5.86855 | 4.71972 | 189 -- |
| | 2.90347 | 2.73739 | 3.18146 | 2.89801 | 2.37887 | 2.77519 | 2.98518 | 4.58477 | 3.61503 | |
| 131 | 3.39317 | 3.97023 | 3.09699 | 3.28335 | 2.7702 | 2.94935 | 2.90303 | 5.35783 | 4.10375 | 190 -- |
| | 2.90347 | 2.73739 | 3.18146 | 2.89801 | 2.37887 | 2.77519 | 2.98518 | 4.58477 | 3.61503 | |
| 132 | 4.26062 | 4.91982 | 4.34352 | 4.40766 | 4.00166 | 4.1738 | 3.56508 | 3.73496 | 0.65216 | 191 -- |
| | 2.90347 | 2.73739 | 3.18146 | 2.89801 | 2.37887 | 2.77519 | 2.98518 | 4.58477 | 3.61503 | |
| 133 | 2.80644 | 3.94187 | 2.65715 | 3.36015 | 2.89171 | 3.27395 | 3.9777 | 6.03531 | 4.53514 | 192 -- |
| | 2.90347 | 2.73739 | 3.18146 | 2.89801 | 2.37887 | 2.77519 | 2.98518 | 4.58477 | 3.61503 | |
| 134 | 3.23153 | 4.23051 | 3.58785 | 4.05877 | 3.38503 | 3.807 | 4.31921 | 6.11573 | 4.86017 | 193 -- |
| | 2.90347 | 2.73739 | 3.18146 | 2.89801 | 2.37887 | 2.77519 | 2.98518 | 4.58477 | 3.61503 | |
| 135 | 3.53526 | 3.84 | 3.68065 | 3.69839 | 2.40398 | 2.80578 | 2.81028 | 5.60012 | 4.41012 | 194 -- |
| | 2.90347 | 2.73739 | 3.18146 | 2.89801 | 2.37887 | 2.77519 | 2.98518 | 4.58477 | 3.61503 | |
| 136 | 3.50926 | 4.03937 | 3.37595 | 3.07922 | 2.93 | 2.61326 | 1.97187 | 4.81814 | 3.60728 | 195 -- |
| | 2.90347 | 2.73739 | 3.18146 | 2.89801 | 2.37887 | 2.77519 | 2.98518 | 4.58477 | 3.61503 | |
| 137 | 2.6935 | 3.91523 | 2.92601 | 3.04509 | 2.83069 | 3.18123 | 3.85035 | 5.91761 | 4.44826 | 196 -- |
| | 2.90347 | 2.73739 | 3.18146 | 2.89801 | 2.37887 | 2.77519 | 2.98518 | 4.58477 | 3.61503 | |
| 138 | 3.55846 | 3.84747 | 3.82739 | 3.8032 | 2.28623 | 2.64101 | 3.22675 | 5.84657 | 4.66418 | 197 -- |
| | 2.90347 | 2.73739 | 3.18146 | 2.89801 | 2.37887 | 2.77519 | 2.98518 | 4.58477 | 3.61503 | |
| 139 | 4.82529 | 4.94238 | 4.64265 | 4.62261 | 4.11168 | 3.57699 | 1.62526 | 5.49175 | 4.38705 | 198 -- |
| | 2.90347 | 2.73739 | 3.18146 | 2.89801 | 2.37887 | 2.77519 | 2.98518 | 4.58477 | 3.61503 | |
| 140 | 2.71222 | 3.84449 | 2.79741 | 2.8297 | 2.58989 | 2.7297 | 3.20049 | 5.35755 | 4.01653 | 199 -- |
| | 2.90347 | 2.73739 | 3.18146 | 2.89801 | 2.37887 | 2.77519 | 2.98518 | 4.58477 | 3.61503 | |
| 141 | 4.00615 | 4.4762 | 3.94211 | 3.89318 | 3.43946 | 3.39323 | 2.79067 | 1.19213 | 2.58759 | 200 -- |
| | 2.90347 | 2.73739 | 3.18146 | 2.89801 | 2.37887 | 2.77519 | 2.98518 | 4.58477 | 3.61503 | |
| 142 | 4.55145 | 4.78517 | 4.49632 | 4.43629 | 3.84074 | 3.37114 | 1.19156 | 5.5214 | 4.3256 | 201 -- |
| | 2.90347 | 2.73739 | 3.18146 | 2.89801 | 2.37887 | 2.77519 | 2.98518 | 4.58477 | 3.61503 | |
| 143 | 3.34396 | 4.18615 | 2.56635 | 1.23693 | 3.22682 | 3.38915 | 3.89554 | 5.5991 | 4.46463 | 202 -- |
| | 2.90347 | 2.73739 | 3.18146 | 2.89801 | 2.37887 | 2.77519 | 2.98518 | 4.58477 | 3.61503 | |
| 144 | 2.57803 | 3.37565 | 2.65536 | 2.9027 | 2.37923 | 2.42186 | 3.53077 | 5.59818 | 4.19026 | 203 -- |
| | 2.90347 | 2.73739 | 3.18146 | 2.89801 | 2.37887 | 2.77519 | 2.98518 | 4.58477 | 3.61503 | |
| 145 | 2.77551 | 3.83157 | 1.97277 | 2.86265 | 2.36563 | 2.69173 | 3.39663 | 5.49507 | 4.11945 | 204 -- |
| | 2.90347 | 2.73739 | 3.18146 | 2.89801 | 2.37887 | 2.77519 | 2.98518 | 4.58477 | 3.61503 | |
| 146 | 3.3476 | 3.95507 | 2.97916 | 3.21123 | 2.826 | 2.82194 | 2.30503 | 3.90281 | 3.62419 | 205 -- |
| | 2.90347 | 2.73739 | 3.18146 | 2.89801 | 2.37887 | 2.77519 | 2.98518 | 4.58477 | 3.61503 | |
| 147 | 2.92684 | 3.53415 | 2.79639 | 2.86504 | 2.6714 | 2.7148 | 2.75975 | 5.10163 | 3.81425 | 206 -- |
| | 2.90313 | 2.73737 | 3.18155 | 2.8982 | 2.37892 | 2.77538 | 2.98509 | 4.58502 | 3.61528 | |
| 148 | 2.86108 | 3.85204 | 2.83366 | 2.96774 | 2.41809 | 2.89927 | 3.27361 | 5.43288 | 4.08203 | 215 -- |
| | 2.90347 | 2.73739 | 3.18146 | 2.89801 | 2.37887 | 2.77519 | 2.98518 | 4.58477 | 3.61503 | |
| 149 | 2.827 | 3.9295 | 2.947 | 2.84094 | 2.85851 | 3.2174 | 3.8915 | 5.95037 | 4.47796 | 216 -- |
| | 2.90347 | 2.73739 | 3.18146 | 2.89801 | 2.37887 | 2.77519 | 2.98518 | 4.58477 | 3.61503 | |
| 150 | 2.86973 | 2.25357 | 2.54389 | 2.97094 | 2.69459 | 2.85852 | 3.58537 | 5.65728 | 4.24341 | 217 -- |
| | 2.90347 | 2.73739 | 3.18146 | 2.89801 | 2.37887 | 2.77519 | 2.98518 | 4.58477 | 3.61503 | |
| 151 | 4.04957 | 4.49307 | 3.98827 | 3.80764 | 3.47484 | 3.51075 | 2.50914 | 1.00434 | 2.78975 | 218 -- |
| | 2.90347 | 2.73739 | 3.18146 | 2.89801 | 2.37887 | 2.77519 | 2.98518 | 4.58477 | 3.61503 | |
| 152 | 4.72309 | 4.85061 | 4.4628 | 4.48098 | 4.02107 | 3.58102 | 1.88462 | 5.28186 | 4.19755 | 219 -- |
| | 2.90347 | 2.73739 | 3.18146 | 2.89801 | 2.37887 | 2.77519 | 2.98518 | 4.58477 | 3.61503 | |
| 153 | 2.83966 | 3.84698 | 2.74318 | 2.31801 | 2.40296 | 2.72285 | 3.24603 | 5.47504 | 4.12399 | 220 -- |
| | 2.90347 | 2.73739 | 3.18146 | 2.89801 | 2.37887 | 2.77519 | 2.98518 | 4.58477 | 3.61503 | |
| 154 | 2.47841 | 3.84817 | 2.80209 | 2.91069 | 2.48506 | 3.01269 | 3.6648 | 5.72456 | 4.28964 | 221 -- |
| | 2.90347 | 2.73739 | 3.18146 | 2.89801 | 2.37887 | 2.77519 | 2.98518 | 4.58477 | 3.61503 | |
| 155 | 3.50527 | 4.14049 | 3.37848 | 3.21929 | 3.03504 | 3.04768 | 2.76118 | 4.40663 | 1.67141 | 222 -- |
| | 2.90347 | 2.73739 | 3.18146 | 2.89801 | 2.37887 | 2.77519 | 2.98518 | 4.58477 | 3.61503 | |
| 156 | 3.46051 | 3.92853 | 3.45577 | 3.475 | 2.70269 | 2.85377 | 2.05286 | 5.27525 | 4.05253 | 223 -- |
| | 2.90347 | 2.73739 | 3.18146 | 2.89801 | 2.37887 | 2.77519 | 2.98518 | 4.58477 | 3.61503 | |
| 157 | 3.18455 | 4.1833 | 3.53233 | 3.99216 | 3.32886 | 3.74622 | 4.24748 | 6.06325 | 4.79998 | 224 -- |
| | 2.90347 | 2.73739 | 3.18146 | 2.89801 | 2.37887 | 2.77519 | 2.98518 | 4.58477 | 3.61503 | |
| 158 | 3.73503 | 3.52921 | 3.62282 | 3.59553 | 3.07632 | 2.93642 | 2.32618 | 4.62538 | 2.91699 | 225 -- |
| | 2.90347 | 2.73739 | 3.18146 | 2.89801 | 2.37887 | 2.77519 | 2.98518 | 4.58477 | 3.61503 | |
| 159 | 2.77504 | 3.86695 | 3.45173 | 3.48253 | 0.92277 | 2.95732 | 3.45348 | 5.76287 | 4.44925 | 226 -- |
| | 2.90347 | 2.73739 | 3.18146 | 2.89801 | 2.37887 | 2.77519 | 2.98518 | 4.58477 | 3.61503 | |
| 160 | 2.37252 | 3.96408 | 2.76789 | 1.79599 | 2.85932 | 2.93721 | 3.628 | 5.55554 | 4.27472 | 227 -- |
| | 2.90347 | 2.73739 | 3.18146 | 2.89801 | 2.37887 | 2.77519 | 2.98518 | 4.58477 | 3.61503 | |
| 161 | 3.86518 | 4.15703 | 3.87085 | 3.80476 | 2.84726 | 2.8073 | 1.56074 | 5.09092 | 3.89445 | 228 -- |
| | 2.90347 | 2.73739 | 3.18146 | 2.89801 | 2.37887 | 2.77519 | 2.98518 | 4.58477 | 3.61503 | |
| 162 | 4.22347 | 4.78698 | 4.25797 | 4.30799 | 3.83111 | 3.85336 | 2.8556 | 3.83491 | 1.53446 | 229 -- |
| | 2.90347 | 2.73739 | 3.18146 | 2.89801 | 2.37887 | 2.77519 | 2.98518 | 4.58477 | 3.61503 | |
| 163 | 4.80849 | 4.90642 | 4.54591 | 4.55791 | 4.09365 | 3.61491 | 1.88885 | 5.36168 | 4.31003 | 230 -- |
| | 2.90347 | 2.73739 | 3.18146 | 2.89801 | 2.37887 | 2.77519 | 2.98518 | 4.58477 | 3.61503 | |
| 164 | 3.98729 | 4.34003 | 3.84639 | 3.79801 | 3.30327 | 3.11266 | 2.30468 | 4.9072 | 3.39865 | 231 -- |
| | 2.90347 | 2.73739 | 3.18146 | 2.89801 | 2.37887 | 2.77519 | 2.98518 | 4.58477 | 3.61503 | |
| 165 | 4.13001 | 4.33412 | 4.44637 | 4.32905 | 3.39874 | 3.72363 | 4.18538 | 5.99711 | 5.14174 | 232 -- |
| | 2.90347 | 2.73739 | 3.18146 | 2.89801 | 2.37887 | 2.77519 | 2.98518 | 4.58477 | 3.61503 | |
| 166 | 3.03569 | 3.90075 | 3.00573 | 3.09204 | 1.84856 | 2.49828 | 2.87913 | 5.14368 | 3.86879 | 233 -- |
| | 2.90347 | 2.73739 | 3.18146 | 2.89801 | 2.37887 | 2.77519 | 2.98518 | 4.58477 | 3.61503 | |
| 167 | 3.02832 | 3.9191 | 3.05809 | 3.18797 | 1.20559 | 3.05132 | 3.45183 | 5.56968 | 4.18219 | 234 -- |
| | 2.90347 | 2.73739 | 3.18146 | 2.89801 | 2.37887 | 2.77519 | 2.98518 | 4.58477 | 3.61503 | |
| 168 | 2.63706 | 3.84577 | 3.36963 | 3.44049 | 2.09599 | 2.60546 | 3.27361 | 5.66066 | 4.40726 | 235 -- |
| | 2.90347 | 2.73739 | 3.18146 | 2.89801 | 2.37887 | 2.77519 | 2.98518 | 4.58477 | 3.61503 | |
| 169 | 4.13001 | 4.33412 | 4.44637 | 4.32905 | 3.39874 | 3.72363 | 4.18538 | 5.99711 | 5.14174 | 236 -- |
| | 2.90347 | 2.73739 | 3.18146 | 2.89801 | 2.37887 | 2.77519 | 2.98518 | 4.58477 | 3.61503 | |
| 170 | 3.5337 | 3.86418 | 3.82864 | 3.85176 | 2.57111 | 2.90314 | 3.40139 | 5.93785 | 4.76384 | 237 -- |
| | 2.90347 | 2.73739 | 3.18146 | 2.89801 | 2.37887 | 2.77519 | 2.98518 | 4.58477 | 3.61503 | |
| 171 | 1.14369 | 3.9346 | 3.26019 | 3.30428 | 2.7607 | 2.3136 | 3.4609 | 5.74715 | 4.40951 | 238 -- |
| | 2.90347 | 2.73739 | 3.18146 | 2.89801 | 2.37887 | 2.77519 | 2.98518 | 4.58477 | 3.61503 | |
| 172 | 4.79062 | 4.91387 | 4.55933 | 4.54474 | 4.08911 | 3.59769 | 2.02622 | 5.40471 | 4.3178 | 239 -- |
| | 2.90347 | 2.73739 | 3.18146 | 2.89801 | 2.37887 | 2.77519 | 2.98518 | 4.58477 | 3.61503 | |
| 173 | 3.55254 | 3.92217 | 3.62831 | 3.63291 | 2.4323 | 2.56229 | 2.06166 | 5.42804 | 4.22422 | 240 -- |
| | 2.90347 | 2.73739 | 3.18146 | 2.89801 | 2.37887 | 2.77519 | 2.98518 | 4.58477 | 3.61503 | |
| 174 | 4.25836 | 4.84403 | 4.30308 | 4.36634 | 3.90761 | 3.95172 | 3.28836 | 3.79313 | 1.01641 | 241 -- |
| | 2.90347 | 2.73739 | 3.18146 | 2.89801 | 2.37887 | 2.77519 | 2.98518 | 4.58477 | 3.61503 | |
| 175 | 2.32634 | 3.86247 | 2.48809 | 2.69167 | 2.68159 | 2.88789 | 3.22597 | 5.30912 | 3.57131 | 242 -- |
| | 2.90347 | 2.73739 | 3.18146 | 2.89801 | 2.37887 | 2.77519 | 2.98518 | 4.58477 | 3.61503 | |
| 176 | 3.70806 | 4.13653 | 3.67338 | 3.66534 | 2.96651 | 2.45344 | 1.58869 | 5.23813 | 4.02633 | 243 -- |
| | 2.90347 | 2.73739 | 3.18146 | 2.89801 | 2.37887 | 2.77519 | 2.98518 | 4.58477 | 3.61503 | |
| 177 | 3.09386 | 3.8353 | 3.58054 | 3.65727 | 2.38841 | 2.86886 | 3.38279 | 5.84237 | 4.61572 | 244 -- |
| | 2.90347 | 2.73739 | 3.18146 | 2.89801 | 2.37887 | 2.77519 | 2.98518 | 4.58477 | 3.61503 | |
| 178 | 4.84385 | 4.93546 | 4.49536 | 4.52685 | 4.16262 | 3.72765 | 2.26283 | 5.32102 | 4.30308 | 245 -- |
| | 2.90347 | 2.73739 | 3.18146 | 2.89801 | 2.37887 | 2.77519 | 2.98518 | 4.58477 | 3.61503 | |
| 179 | 2.95959 | 3.90852 | 2.73145 | 1.71155 | 2.75236 | 2.9299 | 3.19092 | 4.55388 | 4.02765 | 246 -- |
| | 2.90347 | 2.73739 | 3.18146 | 2.89801 | 2.37887 | 2.77519 | 2.98518 | 4.58477 | 3.61503 | |
| 180 | 3.45764 | 3.96581 | 3.39827 | 3.4257 | 2.32623 | 2.68907 | 2.05848 | 5.15342 | 3.93086 | 247 -- |
| | 2.90347 | 2.73739 | 3.18146 | 2.89801 | 2.37887 | 2.77519 | 2.98518 | 4.58477 | 3.61503 | |
| 181 | 3.49135 | 4.01152 | 3.21082 | 3.38793 | 2.78551 | 2.85216 | 2.31515 | 4.88732 | 3.67459 | 248 -- |
| | 2.90347 | 2.73739 | 3.18146 | 2.89801 | 2.37887 | 2.77519 | 2.98518 | 4.58477 | 3.61503 | |
| 182 | 2.59984 | 3.82397 | 2.74555 | 2.89028 | 2.57094 | 2.89663 | 3.30162 | 5.54537 | 4.15131 | 249 -- |
| | 2.90347 | 2.73739 | 3.18146 | 2.89801 | 2.37887 | 2.77519 | 2.98518 | 4.58477 | 3.61503 | |
| 183 | 3.10273 | 3.93899 | 3.06793 | 2.98479 | 2.64808 | 2.75893 | 2.46463 | 5.01643 | 3.76148 | 250 -- |
| | 2.90353 | 2.73746 | 3.18153 | 2.898 | 2.37887 | 2.77526 | 2.98489 | 4.58483 | 3.61509 | |
| 184 | 2.77556 | 3.9534 | 2.84007 | 3.52097 | 2.77605 | 3.36463 | 4.05969 | 6.13946 | 4.61155 | 253 -- |
| | 2.90347 | 2.73739 | 3.18146 | 2.89801 | 2.37887 | 2.77519 | 2.98518 | 4.58477 | 3.61503 | |
| 185 | 4.23309 | 4.51695 | 4.05418 | 4.04354 | 3.54514 | 2.79737 | 2.05308 | 5.05967 | 3.93294 | 254 -- |
| | 2.90347 | 2.73739 | 3.18146 | 2.89801 | 2.37887 | 2.77519 | 2.98518 | 4.58477 | 3.61503 | |
| 186 | 2.76217 | 3.82276 | 2.75088 | 2.91665 | 2.09891 | 2.81435 | 3.54307 | 5.61098 | 4.19982 | 255 -- |
| | 2.90347 | 2.73739 | 3.18146 | 2.89801 | 2.37887 | 2.77519 | 2.98518 | 4.58477 | 3.61503 | |
| 187 | 3.18428 | 1.33641 | 3.21308 | 3.22378 | 2.70037 | 2.97541 | 3.35691 | 5.64772 | 4.36442 | 256 -- |
| | 2.90347 | 2.73739 | 3.18146 | 2.89801 | 2.37887 | 2.77519 | 2.98518 | 4.58477 | 3.61503 | |
| 188 | 4.44297 | 4.64734 | 4.29787 | 4.25943 | 3.70513 | 3.32735 | 1.63114 | 5.19097 | 4.06177 | 257 -- |
| | 2.90347 | 2.73739 | 3.18146 | 2.89801 | 2.37887 | 2.77519 | 2.98518 | 4.58477 | 3.61503 | |
| 189 | 2.97283 | 3.8563 | 2.61019 | 2.44541 | 2.68096 | 2.77295 | 3.34473 | 5.43447 | 4.09447 | 258 -- |
| | 2.90347 | 2.73739 | 3.18146 | 2.89801 | 2.37887 | 2.77519 | 2.98518 | 4.58477 | 3.61503 | |
| 190 | 4.84266 | 4.98596 | 4.71018 | 4.66313 | 4.14762 | 3.57919 | 1.64071 | 5.61982 | 4.46683 | 259 -- |
| | 2.90347 | 2.73739 | 3.18146 | 2.89801 | 2.37887 | 2.77519 | 2.98518 | 4.58477 | 3.61503 | |
| 191 | 2.96886 | 3.84271 | 2.50606 | 2.23991 | 2.43867 | 2.75605 | 3.10587 | 5.38164 | 4.03615 | 260 -- |
| | 2.90347 | 2.73739 | 3.18146 | 2.89801 | 2.37887 | 2.77519 | 2.98518 | 4.58477 | 3.61503 | |
| 192 | 4.13001 | 4.33412 | 4.44637 | 4.32905 | 3.39874 | 3.72363 | 4.18538 | 5.99711 | 5.14174 | 261 -- |
| | 2.90347 | 2.73739 | 3.18146 | 2.89801 | 2.37887 | 2.77519 | 2.98518 | 4.58477 | 3.61503 | |
| 193 | 4.42883 | 4.64124 | 4.25288 | 4.22803 | 3.70233 | 3.35877 | 1.85988 | 5.16553 | 4.05112 | 262 -- |
| | 2.90347 | 2.73739 | 3.18146 | 2.89801 | 2.37887 | 2.77519 | 2.98518 | 4.58477 | 3.61503 | |
| 194 | 4.32006 | 4.60954 | 4.25312 | 4.18473 | 3.60893 | 3.2602 | 1.47614 | 5.33681 | 4.13282 | 263 -- |
| | 2.90347 | 2.73739 | 3.18146 | 2.89801 | 2.37887 | 2.77519 | 2.98518 | 4.58477 | 3.61503 | |
| 195 | 4.87099 | 4.92537 | 4.50327 | 4.55713 | 4.16435 | 3.72988 | 2.50069 | 5.24999 | 4.22787 | 264 -- |
| | 2.90347 | 2.73739 | 3.18146 | 2.89801 | 2.37887 | 2.77519 | 2.98518 | 4.58477 | 3.61503 | |
| 196 | 2.01295 | 3.83746 | 2.62923 | 2.78951 | 2.65108 | 2.88278 | 3.32791 | 5.44105 | 3.78625 | 265 -- |
| | 2.90347 | 2.73739 | 3.18146 | 2.89801 | 2.37887 | 2.77519 | 2.98518 | 4.58477 | 3.61503 | |
| 197 | 3.06148 | 3.91993 | 1.56025 | 2.78935 | 2.76841 | 2.9663 | 3.1073 | 5.3531 | 4.0176 | 266 -- |
| | 2.90347 | 2.73739 | 3.18146 | 2.89801 | 2.37887 | 2.77519 | 2.98518 | 4.58477 | 3.61503 | |
| 198 | 3.47759 | 1.07138 | 3.55227 | 3.47022 | 2.74934 | 2.99572 | 3.02021 | 5.57559 | 4.30789 | 267 -- |
| | 2.90347 | 2.73739 | 3.18146 | 2.89801 | 2.37887 | 2.77519 | 2.98518 | 4.58477 | 3.61503 | |
| 199 | 3.85272 | 4.36901 | 3.78968 | 3.79415 | 3.06756 | 3.25556 | 2.7829 | 4.11682 | 1.90503 | 268 -- |
| | 2.90347 | 2.73739 | 3.18146 | 2.89801 | 2.37887 | 2.77519 | 2.98518 | 4.58477 | 3.61503 | |
| 200 | 4.48245 | 4.84946 | 4.37958 | 4.39217 | 3.97301 | 3.81947 | 2.78356 | 4.34976 | 2.73477 | 269 -- |
| | 2.90347 | 2.73739 | 3.18146 | 2.89801 | 2.37887 | 2.77519 | 2.98518 | 4.58477 | 3.61503 | |
| 201 | 3.43781 | 3.83194 | 3.68626 | 3.73544 | 1.79077 | 2.55653 | 3.42345 | 5.92287 | 4.71349 | 270 -- |
| | 2.90347 | 2.73739 | 3.18146 | 2.89801 | 2.37887 | 2.77519 | 2.98518 | 4.58477 | 3.61503 | |
| 202 | 3.61161 | 3.9805 | 3.95199 | 3.93802 | 2.75595 | 3.10087 | 3.59477 | 5.99348 | 4.85068 | 271 -- |
| | 2.90347 | 2.73739 | 3.18146 | 2.89801 | 2.37887 | 2.77519 | 2.98518 | 4.58477 | 3.61503 | |
| 203 | 3.29571 | 3.96869 | 3.14178 | 3.19598 | 2.676 | 2.43226 | 1.94094 | 4.97522 | 3.73231 | 272 -- |
| | 2.90347 | 2.73739 | 3.18146 | 2.89801 | 2.37887 | 2.77519 | 2.98518 | 4.58477 | 3.61503 | |
| 204 | 2.8777 | 3.82831 | 2.55963 | 2.8794 | 2.64761 | 2.72971 | 3.54563 | 5.60351 | 4.19684 | 273 -- |
| | 2.90347 | 2.73739 | 3.18146 | 2.89801 | 2.37887 | 2.77519 | 2.98518 | 4.58477 | 3.61503 | |
| 205 | 3.17947 | 3.63101 | 2.88986 | 1.15319 | 2.81968 | 3.18288 | 3.59806 | 5.56228 | 4.322 | 274 -- |
| | 2.90347 | 2.73739 | 3.18146 | 2.89801 | 2.37887 | 2.77519 | 2.98518 | 4.58477 | 3.61503 | |
| 206 | 3.45519 | 3.9076 | 3.45303 | 3.46688 | 2.02051 | 1.35458 | 2.84596 | 5.3295 | 4.10639 | 275 -- |
| | 2.90347 | 2.73739 | 3.18146 | 2.89801 | 2.37887 | 2.77519 | 2.98518 | 4.58477 | 3.61503 | |
| 207 | 2.87525 | 3.0584 | 2.5371 | 2.73481 | 2.63606 | 2.90857 | 3.53788 | 5.59647 | 4.18833 | 276 -- |
| | 2.90347 | 2.73739 | 3.18146 | 2.89801 | 2.37887 | 2.77519 | 2.98518 | 4.58477 | 3.61503 | |
| 208 | 3.49912 | 3.84518 | 3.75548 | 3.75749 | 0.86738 | 2.87074 | 3.35269 | 5.89192 | 4.68098 | 277 -- |
| | 2.90347 | 2.73739 | 3.18146 | 2.89801 | 2.37887 | 2.77519 | 2.98518 | 4.58477 | 3.61503 | |
| 209 | 2.90712 | 4.0313 | 3.1536 | 3.5168 | 3.04275 | 3.44139 | 4.03108 | 6.0823 | 4.63717 | 278 -- |
| | 2.90347 | 2.73739 | 3.18146 | 2.89801 | 2.37887 | 2.77519 | 2.98518 | 4.58477 | 3.61503 | |
| 210 | 3.65396 | 4.10439 | 3.53411 | 3.51415 | 2.89227 | 2.72032 | 2.13945 | 4.79947 | 3.59983 | 279 -- |
| | 2.90347 | 2.73739 | 3.18146 | 2.89801 | 2.37887 | 2.77519 | 2.98518 | 4.58477 | 3.61503 | |
| 211 | 2.88129 | 4.01724 | 2.80596 | 1.40204 | 2.9345 | 3.14584 | 3.64213 | 5.55856 | 4.30545 | 280 -- |
| | 2.90347 | 2.73739 | 3.18146 | 2.89801 | 2.37887 | 2.77519 | 2.98518 | 4.58477 | 3.61503 | |
| 212 | 2.944 | 3.99632 | 3.21207 | 3.07928 | 2.47706 | 2.87363 | 2.62157 | 4.89026 | 3.40426 | 281 -- |
| | 2.90347 | 2.73739 | 3.18146 | 2.89801 | 2.37887 | 2.77519 | 2.98518 | 4.58477 | 3.61503 | |
| 213 | 3.29944 | 3.96475 | 3.14626 | 2.99158 | 2.82519 | 2.84993 | 2.19138 | 4.94948 | 3.70917 | 282 -- |
| | 2.90347 | 2.73739 | 3.18146 | 2.89801 | 2.37887 | 2.77519 | 2.98518 | 4.58477 | 3.61503 | |
| 214 | 1.73014 | 3.88825 | 2.89428 | 3.1513 | 2.65166 | 2.73562 | 3.67772 | 5.77869 | 4.34804 | 283 -- |
| | 2.90347 | 2.73739 | 3.18146 | 2.89801 | 2.37887 | 2.77519 | 2.98518 | 4.58477 | 3.61503 | |
| 215 | 2.97097 | 4.05638 | 3.29801 | 3.8004 | 3.07468 | 3.49776 | 4.13871 | 6.17808 | 4.76353 | 284 -- |
| | 2.90347 | 2.73739 | 3.18146 | 2.89801 | 2.37887 | 2.77519 | 2.98518 | 4.58477 | 3.61503 | |
| 216 | 2.92666 | 2.91335 | 2.44294 | 2.35575 | 2.4315 | 2.87572 | 3.38109 | 5.47602 | 3.88189 | 285 -- |
| | 2.90347 | 2.73739 | 3.18146 | 2.89801 | 2.37887 | 2.77519 | 2.98518 | 4.58477 | 3.61503 | |
| 217 | 3.44356 | 4.05419 | 3.44165 | 3.29071 | 2.84849 | 2.63023 | 1.70902 | 4.7806 | 3.57608 | 286 -- |
| | 2.90347 | 2.73739 | 3.18146 | 2.89801 | 2.37887 | 2.77519 | 2.98518 | 4.58477 | 3.61503 | |
| 218 | 4.30461 | 4.50902 | 4.14108 | 4.10077 | 3.54181 | 3.23769 | 2.15223 | 4.98317 | 3.85773 | 287 -- |
| | 2.90347 | 2.73739 | 3.18146 | 2.89801 | 2.37887 | 2.77519 | 2.98518 | 4.58477 | 3.61503 | |
| 219 | 3.38069 | 1.15025 | 3.43381 | 3.35959 | 2.46504 | 2.97792 | 3.17622 | 5.51871 | 4.21657 | 288 -- |
| | 2.90347 | 2.73739 | 3.18146 | 2.89801 | 2.37887 | 2.77519 | 2.98518 | 4.58477 | 3.61503 | |
| 220 | 3.07721 | 3.0092 | 3.2694 | 3.2637 | 2.66456 | 2.89078 | 2.57005 | 5.02262 | 3.78267 | 289 -- |
| | 2.90347 | 2.73739 | 3.18146 | 2.89801 | 2.37887 | 2.77519 | 2.98518 | 4.58477 | 3.61503 | |
| 221 | 3.21588 | 2.52613 | 2.94699 | 3.12992 | 2.58578 | 2.75312 | 2.67351 | 5.03407 | 3.77642 | 290 -- |
| | 2.90347 | 2.73739 | 3.18146 | 2.89801 | 2.37887 | 2.77519 | 2.98518 | 4.58477 | 3.61503 | |
| 222 | 3.14395 | 3.98051 | 3.25292 | 3.28556 | 2.76033 | 2.75863 | 1.98205 | 4.87558 | 3.67659 | 291 -- |
| | 2.90347 | 2.73739 | 3.18146 | 2.89801 | 2.37887 | 2.77519 | 2.98518 | 4.58477 | 3.61503 | |
| 223 | 2.18317 | 3.90854 | 3.02104 | 3.10187 | 2.49669 | 2.34772 | 2.74653 | 5.12823 | 3.85713 | 292 -- |
| | 2.90347 | 2.73739 | 3.18146 | 2.89801 | 2.37887 | 2.77519 | 2.98518 | 4.58477 | 3.61503 | |
| 224 | 2.88695 | 4.02477 | 3.15442 | 3.57919 | 3.03181 | 3.43913 | 4.05741 | 5.96487 | 4.4489 | 293 -- |
| | 2.90347 | 2.73739 | 3.18146 | 2.89801 | 2.37887 | 2.77519 | 2.98518 | 4.58477 | 3.61503 | |
| 225 | 3.65478 | 4.11341 | 3.52176 | 3.10264 | 3.02688 | 2.90444 | 2.04871 | 4.80614 | 3.61104 | 294 -- |
| | 2.90347 | 2.73739 | 3.18146 | 2.89801 | 2.37887 | 2.77519 | 2.98518 | 4.58477 | 3.61503 | |
| 226 | 4.0203 | 4.32364 | 3.88904 | 3.84436 | 3.29242 | 2.84047 | 2.27852 | 4.88107 | 3.71993 | 295 -- |
| | 2.90347 | 2.73739 | 3.18146 | 2.89801 | 2.37887 | 2.77519 | 2.98518 | 4.58477 | 3.61503 | |
| 227 | 4.07041 | 4.51704 | 4.01665 | 3.82098 | 3.5109 | 3.56822 | 2.6592 | 0.93931 | 2.74344 | 296 -- |
| | 2.90347 | 2.73739 | 3.18146 | 2.89801 | 2.37887 | 2.77519 | 2.98518 | 4.58477 | 3.61503 | |
| 228 | 2.74043 | 3.84877 | 2.69295 | 2.98051 | 2.17151 | 2.98395 | 3.6221 | 5.68425 | 4.26026 | 297 -- |
| | 2.90347 | 2.73739 | 3.18146 | 2.89801 | 2.37887 | 2.77519 | 2.98518 | 4.58477 | 3.61503 | |
| 229 | 4.06974 | 4.47111 | 3.90435 | 3.89941 | 3.46749 | 3.28148 | 2.36925 | 4.99959 | 3.75961 | 298 -- |
| | 2.90347 | 2.73739 | 3.18146 | 2.89801 | 2.37887 | 2.77519 | 2.98518 | 4.58477 | 3.61503 | |
| 230 | 3.53126 | 3.85527 | 3.6436 | 3.66186 | 1.67824 | 2.62186 | 2.8189 | 5.51449 | 4.31994 | 299 -- |
| | 2.90347 | 2.73739 | 3.18146 | 2.89801 | 2.37887 | 2.77519 | 2.98518 | 4.58477 | 3.61503 | |
| 231 | 4.70297 | 4.84509 | 4.50218 | 4.33521 | 4.10816 | 3.89905 | 2.70402 | 5.33025 | 4.13656 | 300 -- |
| | 2.90347 | 2.73739 | 3.18146 | 2.89801 | 2.37887 | 2.77519 | 2.98518 | 4.58477 | 3.61503 | |
| 232 | 4.16117 | 0.34853 | 4.37081 | 4.1814 | 3.52713 | 3.81811 | 4.09794 | 5.89679 | 4.96637 | 301 -- |
| | 2.90347 | 2.73739 | 3.18146 | 2.89801 | 2.37887 | 2.77519 | 2.98518 | 4.58477 | 3.61503 | |
| 233 | 3.08763 | 3.92642 | 3.00578 | 3.08654 | 2.76967 | 2.86943 | 1.99402 | 5.11237 | 3.8387 | 302 -- |
| | 2.90347 | 2.73739 | 3.18146 | 2.89801 | 2.37887 | 2.77519 | 2.98518 | 4.58477 | 3.61503 | |
| 234 | 3.20718 | 3.91966 | 3.4794 | 3.68802 | 2.53414 | 3.07678 | 3.60843 | 5.95082 | 4.64243 | 303 -- |
| | 2.90347 | 2.73739 | 3.18146 | 2.89801 | 2.37887 | 2.77519 | 2.98518 | 4.58477 | 3.61503 | |
| 235 | 3.57107 | 3.95413 | 3.58438 | 3.59272 | 2.13812 | 2.56649 | 1.71302 | 5.18442 | 3.98287 | 304 -- |
| | 2.90347 | 2.73739 | 3.18146 | 2.89801 | 2.37887 | 2.77519 | 2.98518 | 4.58477 | 3.61503 | |
| 236 | 2.5037 | 3.98042 | 3.12571 | 3.60425 | 2.95902 | 3.10524 | 4.01731 | 6.14562 | 4.63274 | 305 -- |
| | 2.90347 | 2.73739 | 3.18146 | 2.89801 | 2.37887 | 2.77519 | 2.98518 | 4.58477 | 3.61503 | |
| 237 | 3.33142 | 4.14725 | 2.64027 | 0.99486 | 3.1434 | 3.08656 | 3.69625 | 5.55454 | 4.37587 | 306 -- |
| | 2.90347 | 2.73739 | 3.18146 | 2.89801 | 2.37887 | 2.77519 | 2.98518 | 4.58477 | 3.61503 | |
| 238 | 2.69652 | 3.98805 | 3.1623 | 3.67603 | 2.71784 | 3.40211 | 4.06257 | 6.17855 | 4.65259 | 307 -- |
| | 2.90347 | 2.73739 | 3.18146 | 2.89801 | 2.37887 | 2.77519 | 2.98518 | 4.58477 | 3.61503 | |
| 239 | 3.79703 | 4.41988 | 3.78638 | 3.48044 | 3.58665 | 3.83775 | 4.00762 | 5.08791 | 3.57711 | 308 -- |
| | 2.90347 | 2.73739 | 3.18146 | 2.89801 | 2.37887 | 2.77519 | 2.98518 | 4.58477 | 3.61503 | |
| 240 | 2.98933 | 3.89375 | 2.8645 | 2.66573 | 2.74007 | 2.97191 | 2.71063 | 5.48831 | 4.14512 | 309 -- |
| | 2.90347 | 2.73739 | 3.18146 | 2.89801 | 2.37887 | 2.77519 | 2.98518 | 4.58477 | 3.61503 | |
| 241 | 4.08871 | 4.64221 | 4.09598 | 4.12045 | 3.6343 | 3.65785 | 3.08398 | 3.91121 | 0.85287 | 310 -- |
| | 2.90347 | 2.73739 | 3.18146 | 2.89801 | 2.37887 | 2.77519 | 2.98518 | 4.58477 | 3.61503 | |
| 242 | 3.59529 | 3.94484 | 3.63802 | 3.62731 | 1.72214 | 2.84419 | 2.7186 | 5.16428 | 3.9425 | 311 -- |
| | 2.90347 | 2.73739 | 3.18146 | 2.89801 | 2.37887 | 2.77519 | 2.98518 | 4.58477 | 3.61503 | |
| 243 | 0.92123 | 4.01695 | 3.2162 | 3.51804 | 2.98116 | 3.35957 | 3.89955 | 5.94846 | 4.50832 | 312 -- |
| | 2.90347 | 2.73739 | 3.18146 | 2.89801 | 2.37887 | 2.77519 | 2.98518 | 4.58477 | 3.61503 | |
| 244 | 3.63729 | 0.93137 | 3.64824 | 3.49941 | 3.03624 | 3.24099 | 3.122 | 5.44029 | 4.14682 | 313 -- |
| | 2.90347 | 2.73739 | 3.18146 | 2.89801 | 2.37887 | 2.77519 | 2.98518 | 4.58477 | 3.61503 | |
| 245 | 3.46225 | 4.03364 | 3.31958 | 3.21658 | 2.91809 | 2.41827 | 2.33006 | 4.86952 | 3.65313 | 314 -- |
| | 2.90347 | 2.73739 | 3.18146 | 2.89801 | 2.37887 | 2.77519 | 2.98518 | 4.58477 | 3.61503 | |
| 246 | 3.13012 | 3.90333 | 2.86653 | 2.93774 | 2.54333 | 2.76419 | 2.40077 | 5.12998 | 3.84971 | 315 -- |
| | 2.90347 | 2.73739 | 3.18146 | 2.89801 | 2.37887 | 2.77519 | 2.98518 | 4.58477 | 3.61503 | |
| 247 | 2.65165 | 3.81945 | 2.74001 | 2.73557 | 2.50587 | 2.8631 | 3.23909 | 5.46696 | 3.81282 | 316 -- |
| | 2.90347 | 2.73739 | 3.18146 | 2.89801 | 2.37887 | 2.77519 | 2.98518 | 4.58477 | 3.61503 | |
| 248 | 2.55415 | 3.61178 | 2.59243 | 2.78996 | 2.55147 | 2.79948 | 3.39944 | 5.49285 | 4.10988 | 317 -- |
| | 2.90347 | 2.73739 | 3.18146 | 2.89801 | 2.37887 | 2.77519 | 2.98518 | 4.58477 | 3.61503 | |
| 249 | 2.66634 | 3.41531 | 2.79728 | 2.91738 | 2.46457 | 2.86855 | 3.23119 | 4.22213 | 4.03642 | 318 -- |
| | 2.90347 | 2.7374 | 3.18147 | 2.89801 | 2.37887 | 2.7752 | 2.98511 | 4.58477 | 3.61503 | |
| 250 | 2.97532 | 3.41289 | 2.74765 | 2.68978 | 2.28116 | 2.7845 | 2.80195 | 5.17138 | 3.86328 | 320 -- |
| | 2.90347 | 2.73739 | 3.18146 | 2.89801 | 2.37887 | 2.77519 | 2.98518 | 4.58477 | 3.61503 | |
| 251 | 3.00997 | 3.82478 | 2.74314 | 2.7896 | 2.45999 | 2.80588 | 2.53965 | 5.1557 | 3.85547 | 321 -- |
| | 2.90347 | 2.73739 | 3.18146 | 2.89801 | 2.37887 | 2.77519 | 2.98518 | 4.58477 | 3.61503 | |
| 252 | 2.8122 | 3.7905 | 2.6251 | 2.62135 | 2.47224 | 2.83958 | 3.35964 | 5.4551 | 3.74485 | 322 -- |
| | 2.90347 | 2.73739 | 3.18146 | 2.89801 | 2.37887 | 2.77519 | 2.98518 | 4.58477 | 3.61503 | |
| 253 | 2.83295 | 3.58992 | 2.78824 | 3.05358 | 2.7367 | 2.84284 | 2.83694 | 5.09255 | 3.3308 | 323 -- |
| | 2.90347 | 2.73739 | 3.18146 | 2.89801 | 2.37887 | 2.77519 | 2.98518 | 4.58477 | 3.61503 | |
| 254 | 2.77944 | 3.81922 | 2.74459 | 2.90152 | 2.56399 | 2.90986 | 3.49974 | 5.57629 | 4.17314 | 324 -- |
| | 2.90347 | 2.73739 | 3.18146 | 2.89801 | 2.37887 | 2.77519 | 2.98518 | 4.58477 | 3.61503 | |
| 255 | 2.54247 | 3.84427 | 2.69556 | 2.5689 | 2.65794 | 2.87639 | 3.28082 | 5.40665 | 3.84179 | 325 -- |
| | 2.90347 | 2.73739 | 3.18146 | 2.89801 | 2.37887 | 2.77519 | 2.98518 | 4.58477 | 3.61503 | |
| 256 | 4.74398 | 4.88662 | 4.61038 | 4.5748 | 4.01958 | 3.49274 | 1.40449 | 5.47814 | 4.34912 | 326 -- |
| | 2.90347 | 2.73739 | 3.18146 | 2.89801 | 2.37887 | 2.77519 | 2.98518 | 4.58477 | 3.61503 | |
| 257 | 3.05039 | 3.92287 | 2.81208 | 2.10241 | 2.77657 | 2.87807 | 3.47322 | 5.51568 | 4.20875 | 327 -- |
| | 2.90347 | 2.73739 | 3.18146 | 2.89801 | 2.37887 | 2.77519 | 2.98518 | 4.58477 | 3.61503 | |
| 258 | 2.91438 | 3.83401 | 2.65614 | 1.93814 | 2.5552 | 2.90262 | 3.21183 | 5.53655 | 4.15574 | 328 -- |
| | 2.90347 | 2.73739 | 3.18146 | 2.89801 | 2.37887 | 2.77519 | 2.98518 | 4.58477 | 3.61503 | |
| 259 | 3.8897 | 4.28429 | 3.47181 | 3.69831 | 3.24204 | 3.07326 | 2.32841 | 4.8715 | 3.68322 | 329 -- |
| | 2.90347 | 2.73739 | 3.18146 | 2.89801 | 2.37887 | 2.77519 | 2.98518 | 4.58477 | 3.61503 | |
| 260 | 2.94878 | 2.34022 | 2.61667 | 2.58698 | 2.68977 | 2.8241 | 3.4139 | 5.50433 | 4.14518 | 330 -- |
| | 2.9035 | 2.73743 | 3.1815 | 2.89804 | 2.3789 | 2.77523 | 2.98522 | 4.58104 | 3.61507 | |
| 261 | 2.91846 | 3.26698 | 2.66368 | 2.06261 | 2.6113 | 2.83052 | 3.32774 | 4.33587 | 4.08982 | 332 -- |
| | 2.90347 | 2.73739 | 3.18146 | 2.89801 | 2.37887 | 2.77519 | 2.98518 | 4.58477 | 3.61503 | |
| 262 | 4.10273 | 4.38925 | 4.04113 | 3.98024 | 3.33621 | 2.92421 | 1.52938 | 5.06809 | 3.87243 | 333 -- |
| | 2.90347 | 2.73739 | 3.18146 | 2.89801 | 2.37887 | 2.77519 | 2.98518 | 4.58477 | 3.61503 | |
| 263 | 4.17895 | 4.46218 | 3.9882 | 3.50849 | 3.48131 | 3.24376 | 2.38294 | 4.93975 | 3.79486 | 334 -- |
| | 2.90347 | 2.73739 | 3.18146 | 2.89801 | 2.37887 | 2.77519 | 2.98518 | 4.58477 | 3.61503 | |
| 264 | 4.66922 | 4.86428 | 4.57938 | 4.53513 | 3.96412 | 3.45481 | 0.92447 | 5.52 | 4.33392 | 335 -- |
| | 2.90347 | 2.73739 | 3.18146 | 2.89801 | 2.37887 | 2.77519 | 2.98518 | 4.58477 | 3.61503 | |
| 265 | 2.88487 | 3.9778 | 3.1923 | 2.69826 | 2.68678 | 2.46972 | 2.38116 | 4.913 | 3.4294 | 336 -- |
| | 2.90347 | 2.73739 | 3.18146 | 2.89801 | 2.37887 | 2.77519 | 2.98518 | 4.58477 | 3.61503 | |
| 266 | 3.30168 | 3.9531 | 3.18156 | 3.21271 | 2.65066 | 2.87878 | 2.58741 | 5.07124 | 3.40935 | 337 -- |
| | 2.90347 | 2.73739 | 3.18146 | 2.89801 | 2.37887 | 2.77519 | 2.98518 | 4.58477 | 3.61503 | |
| 267 | 2.69055 | 3.96644 | 3.14739 | 2.93636 | 2.71216 | 2.85395 | 2.65451 | 4.9359 | 2.5173 | 338 -- |
| | 2.90347 | 2.73739 | 3.18146 | 2.89801 | 2.37887 | 2.77519 | 2.98518 | 4.58477 | 3.61503 | |
| 268 | 2.71543 | 3.82018 | 2.73692 | 2.61288 | 2.51777 | 2.88583 | 3.44807 | 5.53194 | 4.14028 | 339 -- |
| | 2.90347 | 2.73739 | 3.18146 | 2.89801 | 2.37887 | 2.77519 | 2.98518 | 4.58477 | 3.61503 | |
| 269 | 2.92877 | 3.91898 | 2.93968 | 2.62672 | 2.80567 | 3.09658 | 3.58288 | 5.70003 | 4.31784 | 340 -- |
| | 2.90347 | 2.73739 | 3.18146 | 2.89801 | 2.37887 | 2.77519 | 2.98518 | 4.58477 | 3.61503 | |
| 270 | 3.23153 | 4.23051 | 3.58785 | 4.05877 | 3.38503 | 3.807 | 4.31921 | 6.11573 | 4.86017 | 341 -- |
| | 2.90347 | 2.73739 | 3.18146 | 2.89801 | 2.37887 | 2.77519 | 2.98518 | 4.58477 | 3.61503 | |
| 271 | 3.4468 | 1.30454 | 3.39493 | 3.31617 | 2.82687 | 2.80687 | 2.7958 | 5.36469 | 4.09397 | 342 -- |
| | 2.90347 | 2.73739 | 3.18146 | 2.89801 | 2.37887 | 2.77519 | 2.98518 | 4.58477 | 3.61503 | |
| 272 | 3.75539 | 3.48523 | 3.62504 | 3.59527 | 2.9501 | 2.97448 | 2.17806 | 4.87076 | 3.68552 | 343 -- |
| | 2.90347 | 2.73739 | 3.18146 | 2.89801 | 2.37887 | 2.77519 | 2.98518 | 4.58477 | 3.61503 | |
| 273 | 3.74609 | 4.1125 | 3.64019 | 3.18714 | 3.03682 | 2.86575 | 1.74391 | 4.68996 | 3.25168 | 344 -- |
| | 2.90347 | 2.73739 | 3.18146 | 2.89801 | 2.37887 | 2.77519 | 2.98518 | 4.58477 | 3.61503 | |
| 274 | 3.23153 | 4.23051 | 3.58785 | 4.05877 | 3.38503 | 3.807 | 4.31921 | 6.11573 | 4.86017 | 345 -- |
| | 2.90347 | 2.73739 | 3.18146 | 2.89801 | 2.37887 | 2.77519 | 2.98518 | 4.58477 | 3.61503 | |
| 275 | 3.389 | 4.20134 | 2.87837 | 0.97353 | 3.2459 | 3.39214 | 3.76839 | 5.5477 | 4.40218 | 346 -- |
| | 2.90347 | 2.73739 | 3.18146 | 2.89801 | 2.37887 | 2.77519 | 2.98518 | 4.58477 | 3.61503 | |
| 276 | 2.91073 | 3.89154 | 1.55769 | 2.88255 | 2.46304 | 2.69593 | 3.29399 | 5.45123 | 4.12584 | 347 -- |
| | 2.90347 | 2.73739 | 3.18146 | 2.89801 | 2.37887 | 2.77519 | 2.98518 | 4.58477 | 3.61503 | |
| 277 | 3.12266 | 3.91936 | 2.70995 | 2.08216 | 2.76398 | 2.89886 | 2.6136 | 5.20313 | 3.92266 | 348 -- |
| | 2.90347 | 2.73739 | 3.18146 | 2.89801 | 2.37887 | 2.77519 | 2.98518 | 4.58477 | 3.61503 | |
| 278 | 2.87207 | 3.8426 | 2.77641 | 2.74598 | 2.67595 | 2.72565 | 3.56541 | 5.63559 | 4.22407 | 349 -- |
| | 2.90347 | 2.73739 | 3.18146 | 2.89801 | 2.37887 | 2.77519 | 2.98518 | 4.58477 | 3.61503 | |
| 279 | 4.552 | 4.74032 | 4.33421 | 4.338 | 3.85212 | 3.52054 | 1.97712 | 4.97337 | 3.70068 | 350 -- |
| | 2.90347 | 2.73739 | 3.18146 | 2.89801 | 2.37887 | 2.77519 | 2.98518 | 4.58477 | 3.61503 | |
| 280 | 4.04311 | 4.38632 | 4.03676 | 3.98298 | 3.26526 | 3.15902 | 1.13278 | 5.42087 | 4.20578 | 351 -- |
| | 2.90347 | 2.73739 | 3.18146 | 2.89801 | 2.37887 | 2.77519 | 2.98518 | 4.58477 | 3.61503 | |
| 281 | 2.57098 | 3.87941 | 2.74765 | 2.05076 | 2.72001 | 2.84902 | 3.57584 | 5.58202 | 4.22358 | 352 -- |
| | 2.90347 | 2.73739 | 3.18146 | 2.89801 | 2.37887 | 2.77519 | 2.98518 | 4.58477 | 3.61503 | |
| 282 | 3.83435 | 4.17303 | 3.71749 | 3.44045 | 3.11301 | 2.92441 | 2.26398 | 4.03334 | 3.56339 | 353 -- |
| | 2.90347 | 2.73739 | 3.18146 | 2.89801 | 2.37887 | 2.77519 | 2.98518 | 4.58477 | 3.61503 | |
| 283 | 4.79625 | 4.9058 | 4.45289 | 4.46832 | 4.1156 | 3.71584 | 2.31132 | 5.29224 | 4.26251 | 354 -- |
| | 2.90347 | 2.73739 | 3.18146 | 2.89801 | 2.37887 | 2.77519 | 2.98518 | 4.58477 | 3.61503 | |
| 284 | 2.94202 | 3.84477 | 2.63707 | 2.69451 | 2.66183 | 2.90137 | 3.10568 | 5.48944 | 4.12644 | 355 -- |
| | 2.90347 | 2.73739 | 3.18146 | 2.89801 | 2.37887 | 2.77519 | 2.98518 | 4.58477 | 3.61503 | |
| 285 | 2.79507 | 3.82214 | 2.73762 | 2.79451 | 2.56577 | 2.69653 | 3.46822 | 5.54614 | 4.15266 | 356 -- |
| | 2.90347 | 2.73739 | 3.18146 | 2.89801 | 2.37887 | 2.77519 | 2.98518 | 4.58477 | 3.61503 | |
| 286 | 2.60584 | 3.85391 | 2.76764 | 2.15057 | 2.53072 | 2.8974 | 3.33988 | 5.44131 | 4.09469 | 357 -- |
| | 2.90347 | 2.73739 | 3.18146 | 2.89801 | 2.37887 | 2.77519 | 2.98518 | 4.58477 | 3.61503 | |
| 287 | 4.13001 | 4.33412 | 4.44637 | 4.32905 | 3.39874 | 3.72363 | 4.18538 | 5.99711 | 5.14174 | 358 -- |
| | 2.90348 | 2.73741 | 3.18148 | 2.89802 | 2.37888 | 2.77521 | 2.9852 | 4.58478 | 3.61504 | |
| 288 | 4.36241 | 4.66366 | 4.31173 | 4.24713 | 3.65397 | 3.0981 | 0.9129 | 5.51418 | 4.30654 | 362 -- |
| | 2.90347 | 2.73739 | 3.18146 | 2.89801 | 2.37887 | 2.77519 | 2.98518 | 4.58477 | 3.61503 | |
| 289 | 2.6299 | 3.81865 | 2.38047 | 2.68704 | 2.6307 | 2.90437 | 3.55224 | 5.60138 | 4.1915 | 363 -- |
| | 2.90347 | 2.73739 | 3.18146 | 2.89801 | 2.37887 | 2.77519 | 2.98518 | 4.58477 | 3.61503 | |
| 290 | 4.39667 | 4.66484 | 4.38506 | 4.27796 | 3.62653 | 3.35899 | 0.81078 | 5.60905 | 4.38851 | 364 -- |
| | 2.90347 | 2.73739 | 3.18146 | 2.89801 | 2.37887 | 2.77519 | 2.98518 | 4.58477 | 3.61503 | |
| 291 | 3.06977 | 3.89719 | 2.91543 | 3.00163 | 2.73196 | 2.64931 | 1.99781 | 5.25273 | 3.94904 | 365 -- |
| | 2.90347 | 2.73739 | 3.18146 | 2.89801 | 2.37887 | 2.77519 | 2.98518 | 4.58477 | 3.61503 | |
| 292 | 2.98093 | 3.84902 | 2.81133 | 2.63405 | 2.56721 | 2.7822 | 2.95326 | 5.38468 | 4.04366 | 366 -- |
| | 2.90347 | 2.73739 | 3.18146 | 2.89801 | 2.37887 | 2.77519 | 2.98518 | 4.58477 | 3.61503 | |
| 293 | 2.80617 | 3.82557 | 2.65643 | 2.28622 | 2.51721 | 2.87727 | 3.16808 | 5.49435 | 4.11885 | 367 -- |
| | 2.90347 | 2.73739 | 3.18146 | 2.89801 | 2.37887 | 2.77519 | 2.98518 | 4.58477 | 3.61503 | |
| 294 | 3.89641 | 4.23778 | 3.78696 | 3.74151 | 3.01456 | 2.99923 | 2.27151 | 4.64053 | 3.04737 | 368 -- |
| | 2.90347 | 2.73739 | 3.18146 | 2.89801 | 2.37887 | 2.77519 | 2.98518 | 4.58477 | 3.61503 | |
| 295 | 2.78638 | 3.81717 | 2.66238 | 2.75489 | 2.46889 | 2.62557 | 2.90962 | 5.48798 | 3.65338 | 369 -- |
| | 2.90347 | 2.73739 | 3.18146 | 2.89801 | 2.37887 | 2.77519 | 2.98518 | 4.58477 | 3.61503 | |
| 296 | 2.8779 | 3.83106 | 2.65698 | 2.80591 | 2.65298 | 2.92588 | 3.01843 | 5.60076 | 4.19476 | 370 -- |
| | 2.90347 | 2.73739 | 3.18146 | 2.89801 | 2.37887 | 2.77519 | 2.98518 | 4.58477 | 3.61503 | |
| 297 | 2.94169 | 3.85121 | 2.8143 | 2.95598 | 2.67677 | 2.90977 | 3.15086 | 5.45641 | 3.65663 | 371 -- |
| | 2.90347 | 2.73739 | 3.18146 | 2.89801 | 2.37887 | 2.77519 | 2.98518 | 4.58477 | 3.61503 | |
| 298 | 2.99871 | 3.89494 | 3.04139 | 3.23675 | 2.49653 | 3.02301 | 3.24829 | 5.6479 | 4.28587 | 372 -- |
| | 2.90347 | 2.73739 | 3.18146 | 2.89801 | 2.37887 | 2.77519 | 2.98518 | 4.58477 | 3.61503 | |
| 299 | 3.6964 | 4.10981 | 3.59171 | 3.55629 | 3.02793 | 2.88812 | 2.23928 | 4.5871 | 2.60401 | 373 -- |
| | 2.90347 | 2.73739 | 3.18146 | 2.89801 | 2.37887 | 2.77519 | 2.98518 | 4.58477 | 3.61503 | |
| 300 | 3.79703 | 4.41988 | 3.78638 | 3.48044 | 3.58665 | 3.83775 | 4.00762 | 5.08791 | 3.57711 | 374 -- |
| | 2.90347 | 2.73739 | 3.18146 | 2.89801 | 2.37887 | 2.77519 | 2.98518 | 4.58477 | 3.61503 | |
| 301 | 3.04541 | 3.89626 | 3.12507 | 3.18587 | 2.58664 | 2.85626 | 2.80437 | 5.24199 | 3.97819 | 375 -- |
| | 2.90347 | 2.73739 | 3.18146 | 2.89801 | 2.37887 | 2.77519 | 2.98518 | 4.58477 | 3.61503 | |
| 302 | 3.73443 | 4.12588 | 3.62914 | 3.59162 | 2.7763 | 2.88073 | 1.80521 | 4.76515 | 3.57129 | 376 -- |
| | 2.90347 | 2.73739 | 3.18146 | 2.89801 | 2.37887 | 2.77519 | 2.98518 | 4.58477 | 3.61503 | |
| 303 | 2.87458 | 3.86163 | 2.65692 | 3.01054 | 2.71131 | 2.79001 | 3.56132 | 5.65054 | 4.23924 | 377 -- |
| | 2.90347 | 2.73739 | 3.18146 | 2.89801 | 2.37887 | 2.77519 | 2.98518 | 4.58477 | 3.61503 | |
| 304 | 3.72968 | 4.09384 | 3.62657 | 3.57749 | 3.01518 | 2.7385 | 2.14422 | 4.68749 | 2.9652 | 378 -- |
| | 2.90347 | 2.73739 | 3.18146 | 2.89801 | 2.37887 | 2.77519 | 2.98518 | 4.58477 | 3.61503 | |
| 305 | 3.68774 | 4.08206 | 3.57886 | 3.40275 | 2.763 | 2.84466 | 2.10693 | 4.7005 | 3.22265 | 379 -- |
| | 2.90347 | 2.73739 | 3.18146 | 2.89801 | 2.37887 | 2.77519 | 2.98518 | 4.58477 | 3.61503 | |
| 306 | 2.84039 | 3.91812 | 2.92771 | 3.21026 | 2.83117 | 3.16936 | 3.37129 | 5.8699 | 4.41766 | 380 -- |
| | 2.90347 | 2.73739 | 3.18146 | 2.89801 | 2.37887 | 2.77519 | 2.98518 | 4.58477 | 3.61503 | |
| 307 | 3.10827 | 1.72208 | 2.89443 | 3.09457 | 2.60755 | 2.91108 | 2.79239 | 5.37431 | 4.0777 | 381 -- |
| | 2.90347 | 2.73739 | 3.18146 | 2.89801 | 2.37887 | 2.77519 | 2.98518 | 4.58477 | 3.61503 | |
| 308 | 2.65587 | 3.83289 | 2.67303 | 2.74306 | 2.10359 | 2.81032 | 3.37697 | 5.47497 | 4.10635 | 382 -- |
| | 2.90347 | 2.7374 | 3.18147 | 2.89802 | 2.37888 | 2.7752 | 2.98519 | 4.58478 | 3.61504 | |
| 309 | 2.88917 | 3.87593 | 2.57634 | 2.42638 | 2.70625 | 2.92664 | 3.3701 | 5.44806 | 4.11455 | 385 -- |
| | 2.90347 | 2.73739 | 3.18146 | 2.89801 | 2.37887 | 2.77519 | 2.98518 | 4.58477 | 3.61503 | |
| 310 | 3.13176 | 3.8772 | 3.0175 | 2.85652 | 2.48078 | 2.68303 | 3.11756 | 5.36133 | 4.0705 | 386 -- |
| | 2.90347 | 2.73739 | 3.18146 | 2.89801 | 2.37887 | 2.77519 | 2.98518 | 4.58477 | 3.61503 | |
| 311 | 2.81549 | 3.81291 | 2.64312 | 2.84448 | 2.54176 | 2.79728 | 3.27095 | 5.50626 | 4.11911 | 387 -- |
| | 2.90347 | 2.73739 | 3.18146 | 2.89801 | 2.37887 | 2.77519 | 2.98518 | 4.58477 | 3.61503 | |
| 312 | 3.00338 | 3.70292 | 2.94366 | 3.03676 | 2.6418 | 2.72316 | 2.70038 | 5.14794 | 3.86175 | 388 -- |
| | 2.90347 | 2.73739 | 3.18146 | 2.89801 | 2.37887 | 2.77519 | 2.98518 | 4.58477 | 3.61503 | |
| 313 | 4.26075 | 4.49747 | 4.07809 | 4.05218 | 3.32305 | 3.26145 | 2.40478 | 4.9215 | 3.7577 | 389 -- |
| | 2.90347 | 2.73739 | 3.18146 | 2.89801 | 2.37887 | 2.77519 | 2.98518 | 4.58477 | 3.61503 | |
| 314 | 3.62934 | 4.06528 | 3.5133 | 3.49234 | 2.97307 | 2.6411 | 2.37715 | 4.72089 | 2.69149 | 390 -- |
| | 2.90347 | 2.73739 | 3.18146 | 2.89801 | 2.37887 | 2.77519 | 2.98518 | 4.58477 | 3.61503 | |
| 315 | 2.67215 | 3.81757 | 2.66453 | 2.86274 | 2.62285 | 2.76226 | 3.41816 | 5.50782 | 4.12161 | 391 -- |
| | 2.90347 | 2.73739 | 3.18146 | 2.89801 | 2.37887 | 2.77519 | 2.98518 | 4.58477 | 3.61503 | |
| 316 | 2.89859 | 3.84575 | 2.63854 | 2.83459 | 2.38629 | 2.77076 | 2.85238 | 5.33411 | 3.46915 | 392 -- |
| | 2.90347 | 2.73739 | 3.18146 | 2.89801 | 2.37887 | 2.77519 | 2.98518 | 4.58477 | 3.61503 | |
| 317 | 4.3899 | 4.634 | 4.30688 | 4.24796 | 3.66285 | 3.06959 | 1.30038 | 5.27231 | 4.09455 | 393 -- |
| | 2.90347 | 2.73739 | 3.18146 | 2.89801 | 2.37887 | 2.77519 | 2.98518 | 4.58477 | 3.61503 | |
| 318 | 3.06474 | 3.96574 | 2.79584 | 2.24886 | 2.85305 | 3.08196 | 3.60033 | 5.56411 | 4.2719 | 394 -- |
| | 2.90347 | 2.73739 | 3.18146 | 2.89801 | 2.37887 | 2.77519 | 2.98518 | 4.58477 | 3.61503 | |
| 319 | 2.26805 | 3.88228 | 2.85632 | 3.11139 | 2.65155 | 3.08567 | 3.75366 | 5.81284 | 4.36273 | 395 -- |
| | 2.90347 | 2.73739 | 3.18146 | 2.89801 | 2.37887 | 2.77519 | 2.98518 | 4.58477 | 3.61503 | |
| 320 | 4.42942 | 4.84922 | 4.38092 | 4.38584 | 3.958 | 3.88041 | 2.89332 | 4.22125 | 2.56544 | 396 -- |
| | 2.90347 | 2.73739 | 3.18146 | 2.89801 | 2.37887 | 2.77519 | 2.98518 | 4.58477 | 3.61503 | |
| 321 | 4.65005 | 4.80648 | 4.5078 | 4.47436 | 3.91515 | 3.44235 | 1.5474 | 5.35734 | 4.22496 | 397 -- |
| | 2.90347 | 2.73739 | 3.18146 | 2.89801 | 2.37887 | 2.77519 | 2.98518 | 4.58477 | 3.61503 | |
| 322 | 3.05966 | 3.93739 | 3.06446 | 2.73373 | 2.35106 | 2.85001 | 2.73416 | 4.38126 | 3.13613 | 398 -- |
| | 2.90347 | 2.73739 | 3.18146 | 2.89801 | 2.37887 | 2.77519 | 2.98518 | 4.58477 | 3.61503 | |
| 323 | 2.84932 | 3.82255 | 2.78012 | 2.70216 | 2.03782 | 2.58111 | 3.19901 | 5.35527 | 4.01084 | 399 -- |
| | 2.90347 | 2.73739 | 3.18146 | 2.89801 | 2.37887 | 2.77519 | 2.98518 | 4.58477 | 3.61503 | |
| 324 | 3.37707 | 3.95525 | 3.23876 | 3.26915 | 2.5015 | 2.4114 | 2.43034 | 4.80927 | 3.5886 | 400 -- |
| | 2.90347 | 2.73739 | 3.18146 | 2.89801 | 2.37887 | 2.77519 | 2.98518 | 4.58477 | 3.61503 | |
| 325 | 2.93089 | 3.32053 | 2.62015 | 2.86785 | 2.354 | 2.73771 | 3.03909 | 5.30984 | 3.96862 | 401 -- |
| | 2.90347 | 2.73739 | 3.18146 | 2.89801 | 2.37887 | 2.77519 | 2.98518 | 4.58477 | 3.61503 | |
| 326 | 2.69886 | 3.79927 | 2.6598 | 2.74064 | 2.24712 | 2.81046 | 2.87558 | 5.24658 | 3.92536 | 402 -- |
| | 2.90355 | 2.7376 | 3.18172 | 2.89834 | 2.37864 | 2.77524 | 2.98456 | 4.58511 | 3.61522 | |

What is claimed is:

1. A method of increasing in a crop plant at least one phenotype selected from the group consisting of: triple stress tolerance, drought stress tolerance, nitrogen stress tolerance, osmotic stress tolerance, ABA response, tiller number, yield and biomass, the method comprising increasing the expression of a carboxyl esterase in the crop plant.

2. The method of claim 1, wherein the crop plant is maize and the carboxyl esterase is a plant carboxyl esterase.

3. The method of claim 1, wherein the carboxyl esterase has at least 80% sequence identity, when compared to SEQ ID NO:18, 39, 43, 45, 47, 49, 51,55, 59, 61, 64, 65, 66, 95, 97, 101, 103, 107, 111, 113, 117, 119, 121, 123, 127, 129, 130, 131, 132, 135, 627 or 628.

4. (canceled)

5. A plant comprising in its genome a recombinant DNA construct comprising a polynucleotide operably linked to at least one heterologous regulatory element, wherein said polynucleotide encodes a polypeptide having an amino acid sequence of at least 80% sequence identity, when compared to SEQ ID NO:18, 39, 43, 45, 47, 49, 51, 55, 59, 61, 64, 65, 66, 95, 97, 101, 103, 107, 111, 113, 117, 119, 121, 123, 127, 129, 130, 131, 132, 135, 627 or 628, and wherein said plant exhibits an increase in yield, biomass, or both, when compared to a control plant not comprising said recombinant DNA construct.

6. The plant of claim 5, wherein said plant exhibits said increase in yield, biomass, or both when compared, under water limiting conditions, to said control plant not comprising said recombinant DNA construct.

7. The plant of claim 5, wherein said plant is selected from the group consisting of: Arabidopsis, maize, soybean, sunflower, sorghum, canola, wheat, alfalfa, cotton, rice, barley, millet, sugar cane and switchgrass.

8. Seed of the plant of claim 5, wherein said seed comprises in its genome a recombinant DNA construct comprising a polynucleotide operably linked to at least one heterologous regulatory element, wherein said polynucleotide encodes a polypeptide having an amino acid sequence of at least 80% sequence identity, when compared to SEQ ID NO:18, 39, 43, 45, 47, 49, 51, 55, 59, 61, 64, 65, 66, 95, 97, 101, 103, 107, 111, 113, 117, 119, 121, 123, 127, 129, 130, 131, 132, 135, 627 or 628, and wherein a plant produced from said seed exhibits an increase in at least one phenotype selected from the group consisting of: drought stress tolerance, triple stress tolerance, osmotic stress tolerance, nitrogen stress tolerance, tiller number, yield and biomass, when compared to a control plant not comprising said recombinant DNA construct.

9-14. (canceled)

15. An isolated polynucleotide comprising:
(a) a nucleotide sequence encoding a polypeptide with stress tolerance activity, wherein the stress is selected from a group consisting of drought stress, triple stress, nitrogen stress and osmotic stress, and wherein the polypeptide has an amino acid sequence of at least 95% sequence identity when compared to SEQ ID NO:18, 39, 43, 45, 47, 49, 51,55, 59, 61,64, 65, 66, 95, 97, 101, 103, 107, 111, 113, 117, 119, 121, 123, 127, 129, 130, 131, 132, 135, 627 or 628; or
(b) the full complement of the nucleotide sequence of (a), wherein the nucleotide is operably linked to a heterologous regulatory element.

16. The polynucleotide of claim 15, wherein the amino acid sequence of the polypeptide comprises SEQ ID NO:18, 39, 43, 45, 47, 49, 51, 55, 59, 61, 64, 65, 66, 95, 97, 101, 103, 107, 111, 113, 117, 119, 121, 123, 127, 129, 130, 131, 132, 135, 627 or 628.

17. The polynucleotide of claim 15 wherein the nucleotide sequence comprises SEQ ID NO:16, 17, 19, 38, 42, 44, 46, 48, 50, 54, 58, 60, 62, 63, 94, 96, 100, 102, 106, 110, 112, 116, 118, 120 or 122.

18. (canceled)

19. A plant comprising in its genome an endogenous polynucleotide operably linked to at least one heterologous regulatory element, wherein said endogenous polynucleotide encodes a polypeptide having an amino acid sequence of at least 80% sequence identity, when compared to SEQ ID NO:18, 39, 43, 45, 47, 49, 51, 55, 59, 61, 64, 65, 66, 95, 97, 101, 103, 107, 111, 113, 117, 119, 121, 123, 127, 129, 130, 131, 132, 135, 627 or 628, and wherein said plant exhibits at least one phenotype selected from the group consisting of increased triple stress tolerance, increased drought stress tolerance, increased nitrogen stress tolerance, increased osmotic stress tolerance, altered ABA response, altered root architecture, increased tiller number, when compared to a control plant not comprising the heterologous regulatory element.

20-28. (canceled)

29. The plant of claim 19, wherein the polynucleotide encodes a polypeptide having an amino acid sequence of at least 95% sequence identity, when compared to SEQ ID NO:18.

30. The plant of claim 19 is maize plant.

31. The plant of claim 19, wherein the heterologous nucleic acid is a constitutive plant promoter.

The application's sequence listing, which the Patent Office published only in electronic form, follows.

SEQUENCE LISTING (630 sequences)

SEQ ID NO: 1 - DNA, 1187 bp, Artificial Sequence
  4X 35S enhancer elements
tgcgtcatcccttacgtcagtggagatatcacatcaatccacttgctttgaagacgtggttggaacgtcttctttttccacgatgctcctcgtgggtgggggtccatctttgggaccactgtcggcagaggcatcttgaacgatagcctttcctttatcgcaatgatggcatttgtaggtgccaccttccttttctactgtccttttgatgaagtgacagatagctgggcaatggaatccgaggaggtttcccgatattaccctttgttgaaaagtctcaattgccctttggtcttctgagactgttgcgtcatcccttacgtcagtggagatatcacatcaatccacttgctttgaagacgtggttggaacgtcttctttttccacgatgctcctcgtgggtgggggtccatctttgggaccactgtcggcagaggcatcttgaacgatagcctttcctttatcgcaatgatggcatttgtaggtgccaccttccttttctactgtccttttgatgaagtgacagatagctgggcaatggaatccgaggaggtttcccgatattaccctttgttgaaaagtctcagttaacccgcgatcctgcgtcatcccttacgtcagtggagatatcacatcaatccacttgctttgaagacgtggttggaacgtcttctttttccacgatgctcctcgtgggtgggggtccatctttgggaccactgtcggcagaggcatcttgaacgatagcctttcctttatcgcaatgatggcatttgtaggtgccaccttccttttctactgtccttttgatgaagtgacagatagctgggcaatggaatccgaggaggtttcccgatattaccctttgttgaaaagtctcaattgccctttggtcttctgagactgttgcgtcatcccttacgtcagtggagatatcacatcaatccacttgctttgaagacgtggttggaacgtcttctttttccacgatgctcctcgtgggtgggggtccatctttgggaccactgtcggcagaggcatcttgaacgatagcctttcctttatcgcaatgatggcatttgtaggtgccaccttccttttctactgtccttttgatgaagtgacagatagctgggcaatggaatccgaggaggtttcccgatattaccctttgttgaaaagtctca

SEQ ID NO: 2 - DNA, 232 bp, Artificial Sequence
  attP1 site from Gateway donor vector pDONR-Zeo
aaataatgattttattttgactgatagtgacctgttcgttgcaacacattgatgagcaatgcttttttataatgccaactttgtacaaaaaagctgaacgagaaacgtaaaatgatataaatatcaatatattaaattagattttgcataaaaaacagactacataatactgtaaaacacaacatatccagtcactatgaatcaactacttagatggtattagtgacctgta

SEQ ID NO: 3 - DNA, 232 bp, Artificial Sequence
  attP2 site from gateway donor vector pDONR221
aaataatgattttattttgactgatagtgacctgttcgttgcaacaaattgataagcaatgctttcttataatgccaactttgtacaagaaagctgaacgagaaacgtaaaatgatataaatatcaatatattaaattagattttgcataaaaaacagactacataatactgtaaaacacaacatatccagtcactatgaatcaactacttagatggtattagtgacctgta

SEQ ID NO: 4 - DNA, 100 bp, Artificial Sequence
  attL1
caaataatgattttattttgactgatagtgacctgttcgttgcaacacattgatgagcaatgcttttttataatgccaactttgtacaaaaaagcaggct

SEQ ID NO: 5 - DNA, 100 bp, Artificial Sequence
  attL2
caaataatgattttattttgactgatagtgacctgttcgttgcaacaaattgataagcaatgctttcttataatgccaactttgtacaagaaagctgggt

SEQ ID NO: 6 - DNA, 1976 bp, Zea mays
gtgcagcgtgacccggtcgtgcccctctctagagataatgagcattgcatgtctaagttataaaaaattaccacatattttttttgtcacacttgtttgaagtgcagtttatctatctttatacatatatttaaactttactctacgaataatataatctatagtactacaataatatcagtgttttagagaatcatataaatgaacagttagacatggtctaaaggacaattgagtattttgacaacaggactctacagttttatctttttagtgtgcatgtgttctcctttttttttgcaaatagcttcacctatataatacttcatccattttattagtacatccatttagggtttagggttaatggtttttatagactaatttttttagtacatctattttattctattttagcctctaaattaagaaaactaaaactctattttagtttttttatttaataatttagatataaaatagaataaaataaagtgactaaaaattaaacaaataccctttaagaaattaaaaaaactaaggaaacatttttcttgtttcgagtagataatgccagcctgttaaacgccgtcgacgagtctaacggacaccaaccagcgaaccagcagcgtcgcgtcgggccaagcgaagcagacggcacggcatctctgtcgctgcctctggacccctctcgagagttccgctccaccgttggacttgctccgctgtcggcatccagaaattgcgtggcggagcggcagacgtgagccggcacggcaggcggcctcctcctcctctcacggcacggcagctacgggggattcctttcccaccgctccttcgctttcccttcctcgcccgccgtaataaatagacaccccctccacaccctctttccccaacctcgtgttgttcggagcgcacacacacacaaccagatctcccccaaatccacccgtcggcacctccgcttcaaggtacgccgctcgtcctccccccccccccctctctaccttctctagatcggcgttccggtccatggttagggcccggtagttctacttctgttcatgtttgtgttagatccgtgtttgtgttagatccgtgctgctagcgttcgtacacggatgcgacctgtacgtcagacacgttctgattgctaacttgccagtgtttctctttggggaatcctgggatggctctagccgttccgcagacgggatcgatttcatgattttttttgtttcgttgcatagggtttggtttgcccttttcctttatttcaatatatgccgtgcacttgtttgtcgggtcatcttttcatgcttttttttgtcttggttgtgatgatgtggtctggttgggcggtcgttctagatcggagtagaattctgtttcaaactacctggtggatttattaattttggatctgtatgtgtgtgccatacatattcatagttacgaattgaagatgatggatggaaatatcgatctaggataggtatacatgttgatgcgggttttactgatgcatatacagagatgctttttgttcgcttggttgtgatgatgtggtgtggttgggcggtcgttcattcgttctagatcggagtagaatactgtttcaaactacctggtgtatttattaattttggaactgtatgtgtgtgtcatacatcttcatagttacgagtttaagatggatggaaatatcgatctaggataggtatacatgttgatgtgggttttactgatgcatatacatgatggcatatgcagcatctattcatatgctctaaccttgagtacctatctattataataaacaagtatgttttataattattttgatcttgatatacttggatgatggcatatgcagcagctatatgtggatttttttagccctgccttcatacgctatttatttgcttggtactgtttcttttgtcgatgctcaccctgttgtttggtgt

SEQ ID NO: 7 - DNA, 313 bp, Solanum tuberosum
agacttgtccatcttctggattggccaacttaattaatgtatgaaataaaaggatgcacacatagtgacatgctaatcactataatgtgggcatcaaagttgtgtgttatgtgtaattactagttatctgaataaaagagaaagagatcatccatatttcttatcctaaatgaatgtcacgtgtctttataattctttgatgaaccagatgcatttcattaaccaaatccatatacatataaatattaatcatatataattaatatcaattgggttagcaaaacaaatctagtctaggtgtgttttgcgaatt

SEQ ID NO: 8 - DNA, 125 bp, Artificial Sequence
  attR1 sequence
acaagtttgtacaaaaaagctgaacgagaaacgtaaaatgatataaatatcaatatattaaattagattttgcataaaaaacagactacataatactgtaaaacacaacatatccagtcactatg

SEQ ID NO: 9 - DNA, 125 bp, Artificial Sequence
  attR2 sequence
accactttgtacaagaaagctgaacgagaaacgtaaaatgatataaatatcaatatattaaattagattttgcataaaaaacagactacataatactgtaaaacacaacatatccagtcactatg

SEQ ID NO: 10 - DNA, 25 bp, Artificial Sequence
  attB1 site
acaagtttgtacaaaaaagcaggct

SEQ ID NO: 11 - DNA, 25 bp, Artificial Sequence
  attB2 site
accactttgtacaagaaagctgggt

SEQ ID NO: 12 - DNA, 55 bp, Artificial Sequence
  Lead gene 5'attB forward primer
ttaaacaagtttgtacaaaaaagcaggctcaacaatgtccgaaccaagtccaatc

SEQ ID NO: 13 - DNA, 50 bp, Artificial Sequence
  Lead gene 3'attB reverse primer
ttaaaccactttgtacaagaaagctgggtttacagaacagagaatatgaa

SEQ ID NO: 14 - DNA, 54 bp, Artificial Sequence
  VC062 primer
ttaaacaagtttgtacaaaaaagcaggctgcaattaaccctcactaaagggaac

SEQ ID NO: 15 - DNA, 53 bp, Artificial Sequence
  VC063 primer
ttaaaccactttgtacaagaaagctgggtgcgtaatacgactcactatagggc

SEQ ID NO: 16 - DNA, 1006 bp, Arabidopsis thaliana
atgtccgaaccaagtccaatcgctgatccttatgcttatcttaacatcgtaaataatccagatggttcaatcactcgcgacctcagcaacttcccctgcaccgcagctacacctgatccttccccactaaaccccgccgtttcaaaagatcttcccgttaaccaattaaagtcaacgtggctccgtctctaccttccctcctccgccgtcaacgagggtaacgtttcgtctcagaaactccccattgttgtgtattaccatggcggaggattcatcctctgcagcgtcgatatgcaactcttccacgatttctgctccgaggtggctcgtgatctcaacgccatcgtcgtatctccttcgtaccgattagctccagagcatcgattaccggcggcgtatgacgacggagttgaggcgttggattggattaaaacctccgacgatgagtggatcaaatctcacgccgatttctcaaatgtgtttcttatgggaactagcgccggagggaatttggcttacaacgtcggactaagatccgtcgattccgtctccgatctgagtccgttacagatccgtggattgattctacaccatccattcttcggcggagaagagcgaagtgaatctgagattagacttatgaacgatcaggtttgtcctcccatagtcaccgatgtaatgtgggatctgtctcttcccgtcggcgttgaccgagatcatgagtattcgaatccgacggttggagatggatcggagaagttggaaaaaatcggacggttgagatggaaagtgatgatgattggaggagaggatgatccgatgatagatctgcagaaagatgtggcaaagctgatgaagaagaaaggagtagaagtggtggagcattataccggcggccatgttcacggtgctgaaatcagagatccttctaaacgtaaaactctgtttctttccatcaaaaacttcatattctctgttctgtaacttttttttttttttacttttt

SEQ ID NO: 17 - DNA, 984 bp, Arabidopsis thaliana
atgtccgaaccaagtccaatcgctgatccttatgcttatcttaacatcgtaaataatccagatggttcaatcactcgcgacctcagcaacttcccctgcaccgcagctacacctgatccttccccactaaaccccgccgtttcaaaagatcttcccgttaaccaattaaagtcaacgtggctccgtctctaccttccctcctccgccgtcaacgagggtaacgtttcgtctcagaaactccccattgttgtgtattaccatggcggaggattcatcctctgcagcgtcgatatgcaactcttccacgatttctgctccgaggtggctcgtgatctcaacgccatcgtcgtatctccttcgtaccgattagctccagagcatcgattaccggcggcgtatgacgacggagttgaggcgttggattggattaaaacctccgacgatgagtggatcaaatctcacgccgatttctcaaatgtgtttcttatgggaactagcgccggagggaatttggcttacaacgtcggactaagatccgtcgattccgtctccgatctgagtccgttacagatccgtggattgattctacaccatccattcttcggcggagaagagcgaagtgaatctgagattagacttatgaacgatcaggtttgtcctcccatagtcaccgatgtaatgtgggatctgtctcttcccgtcggcgttgaccgagatcatgagtattcgaatccgacggttggagatggatcggagaagttggaaaaaatcggacggttgagatggaaagtgatgatgattggaggagaggatgatccgatgatagatctgcagaaagatgtggcaaagctgatgaagaagaaaggagtagaagtggtggagcattataccggcggccatgttcacggtgctgaaatcagagatccttctaaacgtaaaactctgtttctttccatcaaaaacttcatattctctgttctgtaa

SEQ ID NO: 18 - protein, 327 aa, Arabidopsis thaliana
MSEPSPIADPYAYLNIVNNPDGSITRDLSNFPCTAATPDPSPLNPAVSKDLPVNQLKSTWLRLYLPSSAVNEGNVSSQKLPIVVYYHGGGFILCSVDMQLFHDFCSEVARDLNAIVVSPSYRLAPEHRLPAAYDDGVEALDWIKTSDDEWIKSHADFSNVFLMGTSAGGNLAYNVGLRSVDSVSDLSPLQIRGLILHHPFFGGEERSESEIRLMNDQVCPPIVTDVMWDLSLPVGVDRDHEYSNPTVGDGSEKLEKIGRLRWKVMMIGGEDDPMIDLQKDVAKLMKKKGVEVVEHYTGGHVHGAEIRDPSKRKTLFLSIKNFIFSVL

SEQ ID NO: 19 - DNA, 981 bp, Artificial Sequence
  maize optimized At-DTP4 sequence
atgtctgagccgagcccgatcgctgatccttacgcgtacctcaacattgtcaacaaccccgacgggtccatcaccagggacctctctaactttccctgcaccgcagctacacctgacccctcgcctctgaatcccgcagtgtccaaggacctgcccgtgaaccagttgaagtcgacctggttgcggctgtaccttcctagcagcgcagtcaacgagggcaacgtttcctcccagaagctcccgatcgtggtctactaccacggaggcggattcatcctctgcagcgtcgacatgcagttgttccacgacttctgctcggaggtggcgagggacctcaacgcaatcgtcgtgagcccaagctacagactggcccccgaacacaggctgccggctgcctacgacgatggagtcgaagcattggactggatcaagacgtcggacgacgagtggatcaagtcccacgcagacttctccaacgtgttcctcatgggaacctccgccggaggaaacttggcgtacaacgttggcctgaggagcgtcgactccgtctcggatctgtctcctctccagatacgcggcttgatcctccaccacccgttctttggaggcgaggagaggtcggagtccgagatcaggctgatgaacgatcaggtgtgcccccccattgtcacggacgtgatgtgggatctgagcctcccggttggagtggacagggaccacgagtactccaacccgaccgtcggagacggttcggagaagctcgagaagatcgggaggttgcgctggaaggtgatgatgataggcggcgaggacgacccgatgatcgacctccagaaggacgtggccaagctgatgaagaagaagggcgttgaggtcgtcgagcactataccggaggccacgttcacggtgccgaaatccgcgacccctcaaagagaaagacgctgttcctcagcatcaagaacttcatcttctcggtcctc

SEQ ID NO: 20 - DNA, 1359 bp, Zea mays
cgcgacgactttatacatccgcttcctccagtcatcaaagaaacagagcgagcctagactgtgaggaagaaaggactaccatgggcgacgtcgctgccggcgctgccgccctgagtccacccccgatgaccaaggagaccaacctcttcatgcaaatcgtcgtcaacccggacggcacggtcacgcgccccgaggtccccctcgtcccggcctcagccgtagccgctggcggcgtcgtctccagggacgtgcccctcgacgcctccgccggcacgtacctccgcctctacctgcccgacctgtcctccgcgccggccgccaagctccccgtcgtcctctacttccacggcggcggcttcgtgatcctctccgccgccaccgtattctaccacggccactgcgaggcgatggccgccgcggtgcccgccatcgtggcgtccctcgagtaccgcctcgcgccggagcaccgcctgcccgcggcctacgaggacgccgccgcggccgtggcgtggctccgcgacggcgcgccgggggacccctgggtcgcggcgcacggcgacctctcccgctgcttcctcatgggcagcagctcgggcggcaacatggcgttcttcgcggcgctccggaccgggggcctcgacctgggccccgccacggtgcgcggcctcctgctgcaccagccctacctcggcggcgtcgaccggacgccctcggaggccaggtccgtcgacgacgccatgctgccgctggaggccaacgacaggctctggagcctcgcgctgcccctgggcgccgaccgggaccacgagttctgcaaccccgtcaaggccatggcgccggaggcccttgccggcctgccgcgctgcctggtcaccggcaacttgggcgacccgctgatcgacaggcagcgggagttcgctcggtggctgcaggaccgcggcggcgcgaaggcggaggtcgtcgtgaagttggacgtcgcggggttccacgcgtcggagctgttcgtgccggagatcgccgaggtgctgttcgccgcgatgcgcgagttcgtgtacaccggcgacgcttgacacgttgaatttcgtgccggccggtgacaagtggacatacgtgttgcatcgttgtggattgtgtgaccgtgcgcaataattctcggccgtgttgaatcttgacaaactggcaccagagccaccagggggggactactatgtaacacgtgagtactgtagcagctaccgcctagacgcggaccgccggacgtgtagttttcgcgacgcgtgcagctatcggccacggcaacgaatataggagatgttttgtttggaaaaaaaaaaaaaaaaaaaaaaaaaaaaaaaaaaa

SEQ ID NO: 21 - protein, 329 aa, Zea mays
MGDVAAGAAALSPPPMTKETNLFMQIVVNPDGTVTRPEVPLVPASAVAAGGVVSRDVPLDASAGTYLRLYLPDLSSAPAAKLPVVLYFHGGGFVILSAATVFYHGHCEAMAAAVPAIVASLEYRLAPEHRLPAAYEDAAAAVAWLRDGAPGDPWVAAHGDLSRCFLMGSSSGGNMAFFAALRTGGLDLGPATVRGLLLHQPYLGGVDRTPSEARSVDDAMLPLEANDRLWSLALPLGADRDHEFCNPVKAMAPEALAGLPRCLVTGNLGDPLIDRQREFARWLQDRGGAKAEVVVKLDVAGFHASELFVPEIAEVLFAAMREFVYTGDA

SEQ ID NO: 22 - DNA, 1316 bp, Zea mays
cggcacacgagctgtcagctatatactccatcgcacgtccaaccccagggaaacacccatccaagataccgacgagcaggccagagcgaaggaatggactccatggccagcgacgacagcaaccaaggagcagcagccaagccgaagccgaagccaccaccgctaccgctgtccgtgcgcctccagctggccgggctgacagcggccatcgacgccgtggagcgccgcgacgggacggtgaaccgctgcctgtacggcgtgatcgaccggctcctgagcgcgcgcgccagcccgcgcccggacgcctccggggtgcgctcctacgacgtgaccatggacgcgtcccgcggcatctgggcgcgcgtcttcgcgccggccgcggcggaccgcccgctccccgtggtggtgtacttccacggcggcggcttcgcgctcttctccccggccatcgggcccttcaacggcgtgtgccgccgcctctgcgccgcgctcggcgccgtcgtggtgtccgtcaactaccgcctggccccggagcaccgctggcccgccgcctacgacgacggcgtcgacgcgctgcgcttcctcgacgcccgcggcggcgtcccgggcctggacgacggcgtgcccgtcgacctcggcacctgcttcctggccggggagagcgcgggcggaaacatcgtgcaccacgtcgccaaccgctgggcggcggcgtggcagccgtccgcgcgggccctccgcgtcgcgggcgtcttccccgtgcagccctacttcggcggcgtggagcgcacgccgtcggagctggagctagagggcgtggcgcccgtggtcaacctcaggcgctccgacttctcgtggaccgcgttcctgcccgacggcgccacccgcgaccacccggccgcgcacgtcaccgacgacaacgccgacctcgccgacgacttcccgcccgccatggtcattatcggcggcttcgacccgctcatggactggcagcgacgctacgccgacgtgctgcgccggaaggggaaggaggtgctggtggccgagtacccaggcatgttccacggcttctacggcttcccggagctccccgaggctaccaaggtgctgcaggatatgaaggccttcgtcgacagccacatacccacgcccaagctcgccgacgcgtgatgcacgaacaccatcccattccattctagtgtcatgagtcatgactgcttggttcatctatctgctgtcaaaatatatacttcctatatattaaagcagggcgcaaagcttccatcaaaaaaaaaaaaaaaaaaaaaaaaaaaaaaaag

SEQ ID NO: 23 - protein, 357 aa, Zea mays
MDSMASDDSNQGAAAKPKPKPPPLPLSVRLQLAGLTAAIDAVERRDGTVNRCLYGVIDRLLSARASPRPDASGVRSYDVTMDASRGIWARVFAPAAADRPLPVVVYFHGGGFALFSPAIGPFNGVCRRLCAALGAVVVSVNYRLAPEHRWPAAYDDGVDALRFLDARGGVPGLDDGVPVDLGTCFLAGESAGGNIVHHVANRWAAAWQPSARALRVAGVFPVQPYFGGVERTPSELELEGVAPVVNLRRSDFSWTAFLPDGATRDHPAAHVTDDNADLADDFPPAMVIIGGFDPLMDWQRRYADVLRRKGKEVLVAEYPGMFHGFYGFPELPEATKVLQDMKAFVDSHIPTPKLADA

SEQ ID NO: 24 - DNA, 1577 bp, Zea mays
cacgactgcataattgtgctcgctcgccgggccccgggacgtgacacatcgcacggccgaagcagcttgccggctgccgcgtttcgcctcccgcctgccgtgccgcccgtgaccgcgagaaggccggcagctttgcatgaggaggaggaggatgggggcactgcacgtcgtcggcgagcccaggatcagcttccgccagcagcctgcagcagtcgtcgcgaagaacggcggccacggcgccgtcgtcgaggagatccacggcctgatccgcgtctacaaggacggacacgtggagcggctcccggcgatcccagccgtgccctgcacgtggggcggcacggccccggacgcgccgggcggcgtcgtcgcgagggacgtggtggtggaccccgcgacgggggtgtgggcgcggctgtacgcgccgacgtcggcgggggacggagccaggcgccccgtcgtggtgtacttccacggcggcgggttctgcgtcgggtccgcggcctggagctgctgccacgagttcctcgcccagctcgcggcgcgcgcgggctgcgccgtgatgtccgtggactaccggctggcgcccgagcaccgcctgccggccgcgttcgacgacgggctggccgcggtgcggtggctgcggcaccaggccgcagcgtcagcgtcagcgtcagcgtgctgcaacgacgacctgtcgtggtggcgggcccgctgcggctttgaccgcgtgttcctcatgggcgacagcgcgggcgccagcatcgccttgcacgtggccgcgaggctcgggcagggccagcttggcgcgctgccccccttgaccgtcaggggcgccgtcctgatccagccattcctgggcggcgaggggcgtaccgcgtccgagaagaacgtggcgcagccgccacggtcggcgctgacgctggccacctccgactgctactggcggctggcgctgccggccggagccagccgcgagcacccctggtgcaacccgctgtcgggccgcgccgcgccgcgcctggagaccactccgctgcccccgctcctggtgtgcgtctcggagacggacatcctgcgggaccgcaacctggagctgtgcagggcgttgcgcgaggcgggcaagcgcgtggagcaggccgtgtacggcggcgtcgggcacgcgttccaggtgctccacaactgccacctgtcccagccgcggacgcaggagatgctcgcgcacatcaaggccttcgtcagcgccaggtagcaggcgccgcagcagcagccgcctcctccattcgtcgttggtccctaacaaacagacactcgccatgttaattaatccactacctaatcctaatccaatcgaagagtagatgccgtgtaagcaaccagaaccagccttgtgcagtactgtatcagtagtgtgtgacttggagcagaaagcgtccaatgcccagcccgggttgttgttgtagcggtgtcggaaagcaaaagcttatcactacactaccccggtcgtctggccgcttcatataaaaaaaaaaaaaaaaaaaaaaaaaaaaaaaaaaaaaaaaaaaaaaaaaaaaaaaaaa

SEQ ID NO: 25 - protein, 370 aa, Zea mays
MRRRRMGALHVVGEPRISFRQQPAAVVAKNGGHGAVVEEIHGLIRVYKDGHVERLPAIPAVPCTWGGTAPDAPGGVVARDVVVDPATGVWARLYAPTSAGDGARRPVVVYFHGGGFCVGSAAWSCCHEFLAQLAARAGCAVMSVDYRLAPEHRLPAAFDDGLAAVRWLRHQAAASASASACCNDDLSWWRARCGFDRVFLMGDSAGASIALHVAARLGQGQLGALPPLTVRGAVLIQPFLGGEGRTASEKNVAQPPRSALTLATSDCYWRLALPAGASREHPWCNPLSGRAAPRLETTPLPPLLVCVSETDILRDRNLELCRALREAGKRVEQAVYGGVGHAFQVLHNCHLSQPRTQEMLAHIKAFVSAR

SEQ ID NO: 26 - DNA, 1244 bp, Zea mays
cgagcgtgacattgttgtgcgccttccactacagtaatggaagcaggcgccggggaagcagcaccaagcgcgccgcgcagactgaccctgccgtggaaggtgcggctcctgctcctctgcctcgatgtcgtcgccggtctctcgatgcgtcgcgacggcaccatcaaccgctccatcttcaacctcttcgaccttcgtgccaccgccagcacgcgcccggacaggcagggcgtccggtccgccgacgtggacgcgtcgcgcggcctgtgggcgcgcgtgttctggccgtcgccggagtcgtccgcggccccgctcccagtcgtggtatacttccacggcggcgccttcacgctgctctctgcggcctcgtacgtctacgacgccatgtgccgccggttctgccgcgagctgggcgccgtcgtcgtgtccgtcaactaccgcctcgcacccgagcaccgctggcccgccgcgtacgaggacggcgtcgccatgcttcgatacctcgcctccgcgggtctccccgacagcgtcgacgtccccgtggacctctcccgctgcttcctcgccggggacagcgccggcgccaacatcgcccaccacgtggcgcagcgctggacgacggcctcctccccgccgcggtccatccccgtccacctcgccggcgccatcctggtgcagccgtactttggcggcgaggagcggacggaagctgaggtcaggctggatgggaacgtgccggtggtgaccgtgcgaggctcggactggatgtggcgggcgttcctgccggaaggcgccgatcggaaccactccgccgcgcacgtgacagacgacaacgccgacctggcggacggctttccgccggtgatggtggtgatcggtggcttcgacccgctgcaggagtggcagaggcggtacgccgacgtgctgcggaggagggggaaggaggtaagggtggtggagttcccggacgccattcacactttcttcctcttccccgagctcaccgatcatggtacgctcgtcgaggcgatgaaggcgttcatacgcgagcaacgcatctgatctaattctgcctcacggtcacggatcaccaacctacgtggacctacatggtccgtgcaaataattttgtttcccatgcacgtaatggtccctacatggtccgtgcaaataatttctctataaaccactattcaagtctcccatatatttattcagttcatcgagcatctcttttagatttt

SEQ ID NO: 27 - protein, 341 aa, Zea mays
MEAGAGEAAPSAPRRLTLPWKVRLLLLCLDVVAGLSMRRDGTINRSIFNLFDLRATASTRPDRQGVRSADVDASRGLWARVFWPSPESSAAPLPVVVYFHGGAFTLLSAASYVYDAMCRRFCRELGAVVVSVNYRLAPEHRWPAAYEDGVAMLRYLASAGLPDSVDVPVDLSRCFLAGDSAGANIAHHVAQRWTTASSPPRSIPVHLAGAILVQPYFGGEERTEAEVRLDGNVPVVTVRGSDWMWRAFLPEGADRNHSAAHVTDDNADLADGFPPVMVVIGGFDPLQEWQRRYADVLRRRGKEVRVVEFPDAIHTFFLFPELTDHGTLVEAMKAFIREQRI

SEQ ID NO: 28 - DNA, 990 bp, Zea mays
atgggcgacgtcgctgccggcgctgccgccctgagtccacccccgatgaccaaggagaccaacctcttcatgcaaatcgtcgtcaacccggacggcacggtcacgcgccccgaggtccccctcgtcccggcctcagccgtagccgctggcggcgtcgtctccagggacgtgcccctcgacgcctccgccggcacgtacctccgcctctacctgcccgacctgtcctccgcgccggccgccaagctccccgtcgtcctctacttccacggcggcggcttcgtgatcctctccgccgccaccgtattctaccacggccactgcgaggcgatggccgccgcggtgcccgccatcgtggcgtccctcgagtaccgcctcgcgccggagcaccgcctgcccgcggcctacgaggacgccgccgcggccgtggcgtggctccgcgacggcgcgccgggggacccctgggtcgcggcgcacggcgacctctcccgctgcttcctcatgggcagcagctcgggcggcaacatggcgttcttcgcggcgctccggaccgggggcctcgacctgggccccgccacggtgcgcggcctcctgctgcaccagccctacctcggcggcgtcgaccggacgccctcggaggccaggtccgtcgacgacgccatgctgccgctggaggccaacgacaggctctggagcctcgcgctgcccctgggcgccgaccgggaccacgagttctgcaaccccgtcaaggccatggcgccggaggcccttgccggcctgccgcgctgcctggtcaccggcaacttgggcgacccgctgatcgacaggcagcgggagttcgctcggtggctgcaggaccgcggcggcgcgaaggcggaggtcgtcgtgaagttggacgtcgcggggttccacgcgtcggagctgttcgtgccggagatcgccgaggtgctgttcgccgcgatgcgcgagttcgtgtacaccggcgacgcttga

SEQ ID NO: 29 - protein, 329 aa, Zea mays; identical to SEQ ID NO: 21

SEQ ID NO: 30 - DNA, 1032 bp, Zea mays
atgggaggctccgacgaccacgcccgcaggaagccgtccctgccatggacggtgcgcgtccagctggccgcgctcgccctggtgcaccgccgggacggcagcgtccggcgcctcctcttctccctcggcgacctcaagtctggcaccacgtctcgcccgggtgcctcgggggtgcgctccgcggacgtcaccatcgacgcctcccgcggcctgtgggcgcgcgtcttctccccctcgtccggcgcggacgcggacgccgcggcggcccccgttcccgtcgtcgtctacttccacggcggcgggttcgtgctcttctccgcggcgtcccgcccctacgacgccttctgccggcggctctgccgcggcctccgcgccgttgtcgtgtccgtcaactaccgcctggcccccgggcaccggttccccgcggcgtacgacgacggcgtcgcggcgctccgctacctcgacgccaacgccgactccctgccggcgcacgtcccggtcgacctctccagctgcttcctcgccggagacagcgcgggcggcaacatcacgcaccacgtggcacagcgatgggcggtggccgcggtgtcgcccacgaacctccgcgtcgccggcgccgtcttgatccagccgttcttcggcggggaggagcggacggcggccgaggtggcgctggacggggcgtccgcgctgtcggtggcggcgacggaccacttctggaaggagttcctaccggagggcgccacacgggaccacgaggccgcgcgcgtgtgcggcgagggcgtcaagctcgccgacgcgttcccgcccgcgatggtggtcgtcggcggcttcgacctgctcaaggactggcaggccaggtatgtggaggcgctgcgcgggaaggggaagccggtgtgggtggtcgagtaccctgacgccgtccatggcttccacgtgttcccggagctcaccgactccggcaagttcgtggaggagatgaagctgttcgtccaagagcacaagtccaccaacaccaagcgtgccgtctag

SEQ ID NO: 31 - protein, 343 aa, Zea mays
MGGSDDHARRKPSLPWTVRVQLAALALVHRRDGSVRRLLFSLGDLKSGTTSRPGASGVRSADVTIDASRGLWARVFSPSSGADADAAAAPVPVVVYFHGGGFVLFSAASRPYDAFCRRLCRGLRAVVVSVNYRLAPGHRFPAAYDDGVAALRYLDANADSLPAHVPVDLSSCFLAGDSAGGNITHHVAQRWAVAAVSPTNLRVAGAVLIQPFFGGEERTAAEVALDGASALSVAATDHFWKEFLPEGATRDHEAARVCGEGVKLADAFPPAMVVVGGFDLLKDWQARYVEALRGKGKPVWVVEYPDAVHGFHVFPELTDSGKFVEEMKLFVQEHKSTNTKRAV

SEQ ID NO: 32 - DNA, 996 bp, Zea mays
atggacccgtataagtacctcaagatccgcttgaacccggacggctcgctctgccgctacggggaagcgccgctcctccccgcggcgccggccggggagcctgtggcggtggaggacgagcagggggcgcgccgcattgtggtccactccagcgacgtcccgctcaacgacgccaccggcacgggcctccgcctcttcgtgccgtccgggtccggcggccacgacggcgggcggctgccgctggtcgtctacttccacggcggcggctacgtcctgttccgcgcggcctccgcgccgttccacaacacgtgcgcggcgctggccgccgccgccccggcggtcgtggcgtccgtggactaccgcctggcgcccgagcaccgcctccccgcggcgttcgaggacgccgccgacgccgtcctgtgggcgcgcccgcacgccgccgccggcaggccggtgttcgtgatgggcagccacaacggggccaccatcgcgctccgcgccgcgctggcggcggcggacgccggcgtggagctgcgcggggtggtcctgaaccagccgcacctgggcggcgccgcgaggtcgcccgcggaggcggcctcggtggacgaccgcgtgctgccgctgccggcgaacgacctgctctgggagctggcgctgccagtgggcgcggaccgggaccacgagtactgcaacccggaggccatgctcgcccgcgtgggcgccgcgcgcctgcggaggctcccgccctgcctcgtgctcggccggcgcagggacccgccgcgggaccggacgaggacgctggtcagggctctgcacaaggccggggtggccgtggaggccaggctcgacggcgccgggtaccacgccatggagctgttcaagcccaactgcgccgcggagttcaccgcgcaggtggccgacttcgttcgccgccactcctctgccgtcaccgccgtcgccggctccggcgacgtggttggtatgagcaagctgtga

SEQ ID NO: 33 - protein, 331 aa, Zea mays
MDPYKYLKIRLNPDGSLCRYGEAPLLPAAPAGEPVAVEDEQGARRIVVHSSDVPLNDATGTGLRLFVPSGSGGHDGGRLPLVVYFHGGGYVLFRAASAPFHNTCAALAAAAPAVVASVDYRLAPEHRLPAAFEDAADAVLWARPHAAAGRPVFVMGSHNGATIALRAALAAADAGVELRGVVLNQPHLGGAARSPAEAASVDDRVLPLPANDLLWELALPVGADRDHEYCNPEAMLARVGAARLRRLPPCLVLGRRRDPPRDRTRTLVRALHKAGVAVEARLDGAGYHAMELFKPNCAAEFTAQVADFVRRHSSAVTAVAGSGDVVGMSKL

SEQ ID NO: 34 - DNA, 1115 bp, Dennstaedtia punctilobula
gggagcactctagagatggatcacgagggcaaggaagtggaggttgagatgccccctctcttcactctctacaaggatggctctgtgcgcaggagttcgccacatcccttggtgccgccatcgccagagcctggcccagatggggtagcttctaaagacctcactctcaatgcagatcttggcctatgggctcggttattcctccccacacccaatccccatcgccctcaccagaagctccccattgccctctacttccatgggggcggcttcatcttcggcagccctgcctggcaaaacttccatgatttctgcacagccatcgccgctcgctcagcctcgatctggatttctactagctacaggctcgctccagagaatcgccttcctgcctctctcgacgatggctttgctgccctccagtggcttcacgagcagtctcgcctacttgctgagggcaaagaggacatggtggatgcctggctcgcatcccacgccgacttctccaagtgcttcctggcaggcgagagtgcggggggcaccctcgcacatcatgtggcgatgagggccttgaacaggcccttgtcgtctgctgcattggagcccttatgcatccgaggggttattctcattcatccaggtttcatgaggggcaccagaacacaagaagagattgattgccatcaagatgagctgatgaattgggcccttgcggatgtatgcattcgcctcacgctccctgtgggagcatctagcagggatcacccttatttcaaccccctccctgccatctcctcctctgatgctagttttgttcttcccaaaatgctcgtcgcccttgcagacaatgatggccttcattttatggggctggagtacctccgtgcactcaaagacgcaggatgccgtgttgatttagttatgtcgcatggggtcggtcatgtgttctttattgcgcagcctgaatcagagcaagctcagatcatgatggagagcatcagtagcttcatcactgaggaggaacattgaggaaggaaagttttcttgtactttgcccacttatggttttgtgagaaaagaagttttagacaaattgccgaaaaaaaaaaaaaaaa

SEQ ID NO: 35 - protein, 337 aa, Dennstaedtia punctilobula
MDHEGKEVEVEMPPLFTLYKDGSVRRSSPHPLVPPSPEPGPDGVASKDLTLNADLGLWARLFLPTPNPHRPHQKLPIALYFHGGGFIFGSPAWQNFHDFCTAIAARSASIWISTSYRLAPENRLPASLDDGFAALQWLHEQSRLLAEGKEDMVDAWLASHADFSKCFLAGESAGGTLAHHVAMRALNRPLSSAALEPLCIRGVILIHPGFMRGTRTQEEIDCHQDELMNWALADVCIRLTLPVGASSRDHPYFNPLPAISSSDASFVLPKMLVALADNDGLHFMGLEYLRALKDAGCRVDLVMSHGVGHVFFIAQPESEQAQIMMESISSFITEEEH

SEQ ID NO: 36 - DNA, 1179 bp, Dennstaedtia punctilobula
gattttgcactgcaaataaaatatggctaataataaggagatagtattcgagatccctccttccttctatctttacgcagacggttctgttaagaggggcgagttaaggcccccggccatgcccccctccccccaccatggcgtagctttcaaagatgttaccctcaatgaggagcttggcctctgggctcgcctctaccttccccacacctcccctcccaacaagctccccctcgtcctcttcttccacggcggcggcttcatcgcgggaagccccggcacgacgtgccatcctttttgtaccgctttggccaagcactctggtgccatttttgtctcagccagctaccgacttgcgcctgaacatcgccttccttgcgcttatgacgatggcatcgctgccctccaatggctgcactcccaatctctcctcctcgccgagggtcaacaagagcacatggatccctggctcacacacgccgacttctccagatgtttcgtggtgggggagagtgcgggcggcaacatagcgcatcgcgtggttatgctagccctgaacaagttctcctcccccaatgcatgggctcccttatgcattcgagggcttattccgatttacccaggcttcgatcgccagacgagtcgaacgcaagcggaggaggatagcccgttcgaccctctactggactggcgcatcgtcgacatgaccatggagttgtcgcggcctttggggacgaacgaattagattatcgctttgcgaaccctgttgtcgagctctctgcgggcgcgtttagccaccttcctcccaaagctctagtgccccttgccgatggagataggcttcacttcatggggctagagtacgcacaggctctgaagaaggcgggctgctgtgtggatgtgttcatgactgagggtgtaggccattgcttctacgtcttgcaacctaactcagacaaggctagtctgctctatcggaggattgcaaaattcatatctgacgagtgctgacgagcaatccctctatctccctccccgtttccctaaagctgttttctctatatacaaagtttatatccaccactggtccaaaataggcgccccttgtcatggtcaatcgatgataacgtctgttcagtaactagatggattaaaaaagggttttcaaaatgtaaagt

SEQ ID NO: 37 - protein, 329 aa, Dennstaedtia punctilobula
MANNKEIVFEIPPSFYLYADGSVKRGELRPPAMPPSPHHGVAFKDVTLNEELGLWARLYLPHTSPPNKLPLVLFFHGGGFIAGSPGTTCHPFCTALAKHSGAIFVSASYRLAPEHRLPCAYDDGIAALQWLHSQSLLLAEGQQEHMDPWLTHADFSRCFVVGESAGGNIAHRVVMLALNKFSSPNAWAPLCIRGLIPIYPGFDRQTSRTQAEEDSPFDPLLDWRIVDMTMELSRPLGTNELDYRFANPVVELSAGAFSHLPPKALVPLADGDRLHFMGLEYAQALKKAGCCVDVFMTEGVGHCFYVLQPNSDKASLLYRRIAKFISDEC

SEQ ID NO: 38 - DNA, 1433 bp, Sesbania bispinosa
aatagaaaacagatacatacacacattctgtggacacataaatggagagaccctttcacctgtctaaacaccccgtgtgaattttttttctttctttttctacttatcgctgagagagatcgaagtcaccgttgtaatccaaatccaaagtccctcgtcgtttccaccatgtctaatcaaatcaccgatccctaccagcacctcaaaatcgtcctcaacccagacggcaccctcactcgcttacaagatattccaagcaccttaccttcatcagacaccactactcttccaacccctgttctcaccaaagatgtcaccatcaaccaatccaacaacacttgggctcgattattcctacctcaaaatcaaatttccgcttccaaccacaaattacccctcattgttttcttccatggaagtggcttcattgtagcgagtgctgcatcgaccatgttccatgatttctgtgtgagtatggcagatacggttggagctgtcattgcgtcggttgaataccgccttgcgcctgagcaccgcttgccggcagcttatgatgatggcatggaaacgttgttttggctgagaaggaatcaagatgtgtggctgacacgatatgctgacttttccaaatgttacttgatggggaatagtgctggcgctaccattgcctaccatacaggtttacgtgcagcagaagagatgaataatctggagccattgaagatccaagggttgatattgcgccaaccgttctttggtgggacccagaggagtgggtcagagttaaggcttaagaatgatcctgcttttccattgtgtgttaatgatttactgtgggagttggcgttgccaattggggttgaccgtgatcatgagtattccaatctaacggctggggatggtcttgatgagaaactggataaaattaaggagtttgggtggagggtgttggtgagtgggaacggtggtgatccattaatggatcgtgagaaggagctagtaaagttaatggaggagaaaggtatccaagtggtgagtgactttgaggaagaaggtttccatggggtagaatattttgacacctccaaagcaaaacaactcattgggttattgaaaggttttatttcctcatttgatgcttaggataccataagctcgtgagagtgctgcattggtaatgtgttattattgttacctcattatgctcctcctttttcttgtagtatggattttattttctttcgtaccccttgtagtatggccgagggttagaagagaaatgatacctatacaacattatggacaataaagtgtgagatagagggataagagactcgtatgagatgcaatagttgatataatagaaaaagatgaggataaaaattgagactctaaaaaaaaaaaaaaaaaaaaaaaaaaaaaaaaaaaaaaaa

SEQ ID NO: 39 - protein, 324 aa, Sesbania bispinosa
MSNQITDPYQHLKIVLNPDGTLTRLQDIPSTLPSSDTTTLPTPVLTKDVTINQSNNTWARLFLPQNQISASNHKLPLIVFFHGSGFIVASAASTMFHDFCVSMADTVGAVIASVEYRLAPEHRLPAAYDDGMETLFWLRRNQDVWLTRYADFSKCYLMGNSAGATIAYHTGLRAAEEMNNLEPLKIQGLILRQPFFGGTQRSGSELRLKNDPAFPLCVNDLLWELALPIGVDRDHEYSNLTAGDGLDEKLDKIKEFGWRVLVSGNGGDPLMDREKELVKLMEEKGIQVVSDFEEEGFHGVEYFDTSKAKQLIGLLKGFISSFDA

SEQ ID NO: 40 - DNA, 1239 bp, Sesbania bispinosa
actttcaacagatcttcgcaattcgccatgtcactacccattgcggctactgcattctccttgtgtctcctcctctcagttgttaactcatctatggatccttacaaggcactccgcatcatccccaacccaaacggtaccttcacgcgcttagagacacacccccaaagccctccctcacctgatcccacactccctacacccgttctctccaaagacctaaccatcaaccaatcaaaacacacttgggctcggatctacctaccccacaaagcactcgataaccctcaccactccaagctgcctctcattgtcttctaccatggcggcggcttcattttctacagcgccgcctccacttacttccatgatttctgcgtcaacatggccaaaaacacccaatccgtcgtcgtttccgtcgattaccgcctcgctccagagcaccgtctgccggccgcatatgaagactccgtggaggcgctgcactggattaaaacctccaacgacccgtggttgacgcgtcacgctgattactcccgttgttatctcatgggagagagtgccgggggtaatattgcctacttcgcgggactaggtgcagccgcagaggttgatcatatcaaaccggtaaacatacgagggctggtattgattcaaccgttttttggcgggaccaaggggacccaatcagagttgaggcttggcgaggagtattggaatctacccctggtcgctactgatgctatgtggaatttgtcgttgcatgtaggcgctgaccgtgatcacgagtattccaatccaacggtgaacggtggggctaaggttttagataagatcaaattgcttggatggaaggttgctgtgtttgggtgtcatggagacccactggtggaccggcaagtggagttggtaaaactgctcgagaaaaagggcgtccatgtggtgggacacttttacgatgggggtcgacatgggatttttgtgggtgacccttccatgtctattaaggtatttgatttagttaagagtcttcattgatgaccatgagttatctaaacaatattcggatcatgttcttgatcagtactgtttatgttctgtgcgtgtcaagtgactattgattgatatgtcaaaagaaagcaaagcatgcccaaagaaatatcactcttgtgctgataaaataaaaactactaccttatatttgaaaaaaaaagaaaaaaaaaaaaaaaaaaaaaaaaa

SEQ ID NO: 41 - protein, 336 aa, Sesbania bispinosa
MSLPIAATAFSLCLLLSVVNSSMDPYKALRIIPNPNGTFTRLETHPQSPPSPDPTLPTPVLSKDLTINQSKHTWARIYLPHKALDNPHHSKLPLIVFYHGGGFIFYSAASTYFHDFCVNMAKNTQSVVVSVDYRLAPEHRLPAAYEDSVEALHWIKTSNDPWLTRHADYSRCYLMGESAGGNIAYFAGLGAAAEVDHIKPVNIRGLVLIQPFFGGTKGTQSELRLGEEYWNLPLVATDAMWNLSLHVGADRDHEYSNPTVNGGAKVLDKIKLLGWKVAVFGCHGDPLVDRQVELVKLLEKKGVHVVGHFYDGGRHGIFVGDPSMSIKVFDLVKSLH

SEQ ID NO: 42 - DNA, 1466 bp, Sesbania bispinosa
aacgagtgcctaggcggtatctacatttgtttatattaatgtcgctaaaaaataatcataaattgaactatcacacgatcaatgttccttaaaaagttgaacagcttcatagcttgccagcttggtgcctgctgtttccgagccagcgttccacaacagatctgtctatagtcaggtctgtgtcactaagcattgctgcaactactatactttccttgcgtctccttctcttctcttccttgttaacgctaactcatccatggatccatacaaagtactcaacttaatcctcaacccaaacggtaccgtcacacgcttagaaaaaatcccacaatccccaccctcaccggatccaaatctccccacaccagcactctccaaagacctcaccatcaaccgatcaaaacatacttgggctcgaatctaccttccccacaaaccccactccaagaaactaccgctcattatcttctaccacggtggtggcttcattttctacagcgccgcttcaacttacttccacgatttctgtgccaacctcgccaacaaaacccaatccgtcgtcgtttcactcgaataccgcctcgcaccggaacaccgtcttcccgcggcgtacgacgactccgtggaaattcttcactggattaaaaactcaaacgacgcttggttgacacatcacgctgactactcacgatgttatctcatgggagagagcgctggaggtaatatcgcctacaccgcgggtctacgtgcggctgcgatggttgatgagattaaaccgattagcatcaaagggttgatattggttcaaccgttcttcggtgggaccaagaggactccatctgagataaggcttgagaaggataagaatctacctttgatttgtactgatgcgttgtgggaattatcgttacctgtaggcgttgatcgtgattacgtgtattctaatccaacggtggatggcggtgatcaggttttggagaagtttaggttgtttggttggaaggttgcggtttttgggtgtgatggggatcaacttgtggaccgtcagagggagttagtgaagttgcttgagggtaaaaatgtcaatgtggttggccagttttatagtgggggtagacatggtattttcatgggtgttccttccatgtctgaaaaagtgttcgatttagtcaagagttttcatggatgagttatgagtattgcagtcaatacttttccatgttatttggattttggagaagtatgtgagaataaagcaagcaactctatctatcactacttgtatcaaatatctgatatcaaatatctaatatatcagatatcttgcttccaatagtgtttgcaatttgcaactttgtatgttctatgtaacttatattttgaaatttcaccacgtctgtgtttcccttgaaaatcagaaaacaaccgctgatctttcaaatttaaaaaaaaaaaaaaaaaaa

SEQ ID NO: 43 - protein, 310 aa, Sesbania bispinosa
MDPYKVLNLILNPNGTVTRLEKIPQSPPSPDPNLPTPALSKDLTINRSKHTWARIYLPHKPHSKKLPLIIFYHGGGFIFYSAASTYFHDFCANLANKTQSVVVSLEYRLAPEHRLPAAYDDSVEILHWIKNSNDAWLTHHADYSRCYLMGESAGGNIAYTAGLRAAAMVDEIKPISIKGLILVQPFFGGTKRTPSEIRLEKDKNLPLICTDALWELSLPVGVDRDYVYSNPTVDGGDQVLEKFRLFGWKVAVFGCDGDQLVDRQRELVKLLEGKNVNVVGQFYSGGRHGIFMGVPSMSEKVFDLVKSFHG

SEQ ID NO: 44 - DNA, 1322 bp, Sesbania bispinosa
aactatggccctcttcttttcattatcaatattcacattttcattctctctaacaatcctcttattgttaaactcaacaacaccccaaacacaatctccaacaaaaccatgtaacgatgatccttacaaacaactcaaccttatccttaatccaaacggcacagtcattcgaccaagcaaaccaaacacaaacacccctccatcattagatcctactctcccaattctttccaaagatctcatcatcaacaaatccaagcccacgtgggctcggatctaccttccccgcaaagcactggatcacacctccaacaaacttccacttataatttttttccatggcggtggattcatttttcttagtgcagcttcaacaatttttcacgatttttgtttcaacatggcaaagaacctcgtagcggttgtcgtgtcggtagagtatcgtctcgcaccggaacatagactccctgctgcatatgaagatgcggtagaggcgctgcattggatcaaaactaaccaatcagatgattggttaaaaaaccatgttgattattctaatgtttttcttatgggtagtagtgcaggtggaaacatagcatacaacacgggtctacgtgtagcaatggtaggagatgaagtttctaagatgatcaaagggcttatattgattcaaccatttttcagtgggacccacaggacacgttcggaaattaagcttgctaatgattctcatttgctattgtgtaataatgatatgttatgggaattatctttaccggttggagttgatcgtgatcatgagtattgtaatccaatggtgagagataatgttgtgagattgaaaaagattagagagtttgagtggtgggtgatggtgacctattgtgacggtgacccccttgtggaccgttcgattgagttagtgagattattggagaaaaatggagttaatgttgtgggacattttacgaaaggaggttatcatggtgttcaagatagtgagcctttgaaagcaaaggaactttttggagagattaaaaagtttatttcatctttgcctaatcacattatggaatgatatacattgtgatagtaggatccttttaatgtttcaaaaataaataaaatatcaatataactagaattttgaattatcgtttaagttggttggttatattagtgtgtcgtacacgagatttgggttgattttgaaaaaaagaattcacatggtaaattttttttagttccattgagtttttgaatgactagatacaaatatttaattaaaaaaaaaaaaaaaaaaaaaaaaaaaaaaaaaaaaa

SEQ ID NO: 45 - protein, 357 aa, Sesbania bispinosa
MALFFSLSIFTFSFSLTILLLLNSTTPQTQSPTKPCNDDPYKQLNLILNPNGTVIRPSKPNTNTPPSLDPTLPILSKDLIINKSKPTWARIYLPRKALDHTSNKLPLIIFFHGGGFIFLSAASTIFHDFCFNMAKNLVAVVVSVEYRLAPEHRLPAAYEDAVEALHWIKTNQSDDWLKNHVDYSNVFLMGSSAGGNIAYNTGLRVAMVGDEVSKMIKGLILIQPFFSGTHRTRSEIKLANDSHLLLCNNDMLWELSLPVGVDRDHEYCNPMVRDNVVRLKKIREFEWWVMVTYCDGDPLVDRSIELVRLLEKNGVNVVGHFTKGGYHGVQDSEPLKAKELFGEIKKFISSLPNHIME

SEQ ID NO: 46 - DNA, 1157 bp, Sesbania bispinosa
ctctctctctctcatggctaatcaaacatggaccctgccaccaaccaccgatccctaccaattcctcaaaatccaccacaatcccgacgacacactcactcgaaatcttgaagatccacacacttcaccttcatccggttccactctcccaatctctgttctaaccaaagatctcaccatcaataactcaaaccaaacatggcttcgattattcctacctaaaaaagcaacaatttcaaacgaaaacaataaacttcttccactcgttgttttcttccatggaagtggcttcatcctactaagtgcagcctccaccatgttccatgatttttgtgtcgacatggctgacactgcggaggccgttgtcgcatcggttgattaccgtctagcgccggagcaccggttgccggcggcatacgacgatgctatggaagctttaagtttgattagatccagtgaagatgaatggttgactaaatatgttgactattctaaatgttatctaatgggaaatagtgctggagctacgattgcttatcatgcaggactacgtgtggttgaaaatgtgagagatcttgagccgatgaaaatccaagggttgatattgcgtcaaccgttttttggtgggaccgagaggactaagtcagagttaagacttgagaatgatcctgtttttccattgtgtgttggtgatttgatgtggcaattagcattacctattggagttgatcgtgatcatgagtattccaatctaacggctgggaatggtgttgatgaaaaatatgagaagattaaggatcaaggatggaaggtgttggtgagtatgaacggtggagatccgttggttgatcgtaataaggagttggtgaaattgatggaggagaagggtgtggaagtggtggtggattatcaagaagaaggttttcatggtgttgaattttttgaggcatctaaagcaaagaacttcattggattggtgaagggtttcgtttcctcttttgcatcttaaggtcaactactacacaaaaataagtaatgatcattctctttgtcatctcaattattgtcctttatttgaacatgtaatatggatctattctaaagaattaaataaacatgggtgaatttactatggatcaaaaaaaaaaaaaaaaaaa

SEQ ID NO: 47 - protein, 331 aa, Sesbania bispinosa
MANQTWTLPPTTDPYQFLKIHHNPDDTLTRNLEDPHTSPSSGSTLPISVLTKDLTINNSNQTWLRLFLPKKATISNENNKLLPLVVFFHGSGFILLSAASTMFHDFCVDMADTAEAVVASVDYRLAPEHRLPAAYDDAMEALSLIRSSEDEWLTKYVDYSKCYLMGNSAGATIAYHAGLRVVENVRDLEPMKIQGLILRQPFFGGTERTKSELRLENDPVFPLCVGDLMWQLALPIGVDRDHEYSNLTAGNGVDEKYEKIKDQGWKVLVSMNGGDPLVDRNKELVKLMEEKGVEVVVDYQEEGFHGVEFFEASKAKNFIGLVKGFVSSFAS

SEQ ID NO: 48 - DNA, 1228 bp, Artemisia tridentata
ggaggaactatatgcatcaattagaagacattgtgcggttacacacacatattactccattctaaagcaagaatgacttctccagctcaaccaaccaattttgatccttataagttcctcaatatcaccttaaactccgatggatcactgacgcgacccaccacctttccagtaacacagttaaattctcaactcaccaccgattcccaactcagtctccataaagacatcccactaaacgccactacaggcactttccttcgtctctatcgccccgtaacgccacctgcaaaaaaattaccaatcatcatctactttcacggtggcggtttcattttagtcagcgccaccactactttgatacaccttacatgtactgaaatttccgctcattctccagccattatcgtatcccttgaataccgtcttgccccagaacaccgtctccctgcagcgtatgatgatggactggatgcaatactatgggtgcgtgaccaagcgttgagatcagaagttgacggttgtgacgagtggttgagcgaatttgctgacttttctaaagtctacttaatgggaactagtgctggaggaaatttaacctacaatgcaggtttacgtgcacttgatgttggtcttgatccgatcaagatcacagggcttataatagaccaacctttctttggtggggtcgagcgtactgaagctgaactaaagctagttaatgactatgttctccctttggcagcaacggatcttatgtggtctctggcattgcctgtaggctctgatagaaaccacgagtactgcaatccgttgtttgagcgagatagattctcaaatgattatattaaaagacttcctacttgtttgatcagagtaaatggtgaagatccagtcgtcgatagacaaaaggattttgctaatatgttggaggcacgtggtgtgcacgtgataagaaagttctacgagaaagggtgtcacggtgcagagatctttgatgctaaaaaggctgagatgttatatgacgatgttaagaatttcatttggcttcgctgataaaagataagtgtaacagctataatatacattaagctgttggaaagtttaatcatttagaaatcgatcagaaatgttttacatcatttatctatgtattatttcattatcatgtacttattgggcttgactttgagattccacgatatagatatgcagagtattattcgaa

SEQ ID NO: 49 - protein, 327 aa, Artemisia tridentata
MTSPAQPTNFDPYKFLNITLNSDGSLTRPTTFPVTQLNSQLTTDSQLSLHKDIPLNATTGTFLRLYRPVTPPAKKLPIIIYFHGGGFILVSATTTLIHLTCTEISAHSPAIIVSLEYRLAPEHRLPAAYDDGLDAILWVRDQALRSEVDGCDEWLSEFADFSKVYLMGTSAGGNLTYNAGLRALDVGLDPIKITGLIIDQPFFGGVERTEAELKLVNDYVLPLAATDLMWSLALPVGSDRNHEYCNPLFERDRFSNDYIKRLPTCLIRVNGEDPVVDRQKDFANMLEARGVHVIRKFYEKGCHGAEIFDAKKAEMLYDDVKNFIWLR

SEQ ID NO: 50 - DNA, 1156 bp, Artemisia tridentata
gaaccatgtctgacctggtatccaattcggatccttataagttcctcaaaatcaaacaaaacccagacgggtcattaacccgactcgccccacttctatccatacctgcaacaccccaactcactaccgagtcacaactcgttctctctaaagacataccactcaacaccaccaatgccacctttgtctgtctctttcggcctataatatcgaaaactactaatggaaaacttcccattattatttatttccatggtgggggctttgtgttattcagcgccacatcatttcccttccacgagtcatgcaccgcggtgtctgctcagacacctgcggtcgtgatctctgttgagtatcgtctcgcacccgaacaccgcctccccgctgcgtatgaggacgccatgcaggcggtgttgtgggtgcgtgatcaggctttaggggttaatggttgtgatgcatggttgagtgagtttggtgattttagtaaagtgtttttaatgggaagtagttccggaggaaatatagtttataatgctggtttacgagcccttgatcttgatctgagtgtgatcaagatcgtggggctcataatgaaccaaccattttttggtggggtcgaggacacggagtctgaggttagattggtaaatgaccgtattgtccctttaatggcaagtcgtctcatgtggtctcttgcactcccagaagagtgtgacagagaccacgagtattgtaacccgttacgagatcaagatgaatctcgtaatgagaaaatcaggcgtttgccgaaatgtgtggttaggggttacgctggggacccactagttgatcgacaaagggagtttgctaaaatgttggagacatgtggtgtgcacgtgataaagaagtttgatgatgaggggtatcatggtgtggagatctttgatccccgaaaggcacaagtgttgtatgatgatatcaagagtttcatatgttcctttctggaaaagaaatcaactttgtgaacaactgctgacattggtatgtttaatgtctgaatttctaataactttgtgttcgatttacatatagatgtatttctaattaacactgttccatatgatatgaaacttgtttttatttaaaaaaaaaaaaaaaaaaaaaaaaaaaaaaaaaa

SEQ ID NO: 51 - protein, 332 aa, Artemisia tridentata
MSDLVSNSDPYKFLKIKQNPDGSLTRLAPLLSIPATPQLTTESQLVLSKDIPLNTTNATFVCLFRPIISKTTNGKLPIIIYFHGGGFVLFSATSFPFHESCTAVSAQTPAVVISVEYRLAPEHRLPAAYEDAMQAVLWVRDQALGVNGCDAWLSEFGDFSKVFLMGSSSGGNIVYNAGLRALDLDLSVIKIVGLIMNQPFFGGVEDTESEVRLVNDRIVPLMASRLMWSLALPEECDRDHEYCNPLRDQDESRNEKIRRLPKCVVRGYAGDPLVDRQREFAKMLETCGVHVIKKFDDEGYHGVEIFDPRKAQVLYDDIKSFICSFLEKKSTL

SEQ ID NO: 52 - DNA, 1139 bp, Artemisia tridentata
gatcagccacaatggcttccaattcggatccttataagatcttcaatatgacccaatctgatcttgacaagatcttcaatgtcacccaaaaccctgatgggtctgtgacccgacccacaggctttccatcctcacccgacaatcccgaactcaccctttttaaagacatcccactaaacaccaccaacaatacttttctccgcttgtaccgccctgtctcgcgcacaacccaaaaacttcctattatcatctacttccatggtggggggttcgtcttcagcagtgcaacagatgcttatgtgcataatgcatgttccaacatatccactcactctccagcccttgtcatatcccttgagtaccgccttgcccccacacaccgtctccctgcagcctatgatgatggggtggacgctattaaatgggttcgtgaccaggtgttgatgtctaaagttgaagattgtgatgagtggttgaatgagtttggtgacttttctaaagtctacttaatgggaactagtgcaggaggaaatttaacttaccaagcaggtttacgtgcacttgagcttgaccttgatccgattttgatcgtagggcttataatggaccaaccttctttgggcggggtagaacgtactgatgctgaactaagacggataaatgatcatgttatccctttgacagcaacagatttcatgtggtctttcgcgttgccgttaagttctgacagagaccatgagtatgctaatccgttgaaagatcatcacaaatcctccaatgaaataatcaaacggcttcctatgtgtatgatcaggatgaatggtgatgatccaatgattgatagacaaaaggatttcgctaatatattggaaaatcatggtgtgcacgtcacaagaaagtcttatgaggatagttgtcatggtgtagagaccgttgatcccaaaaaggcacaaatcttgtacgatgatgttaaaaatttcatttggaactgacagaaagaaagaaaaaaaattcttcctatcaataattataatacatgataaattgttgtgataagtttcttacttgtcagcaggaattacataattcaaatcgaacttgagtaaaaaaattagcgcatcgaaaaaaaaaaaaaaaaa

SEQ ID NO: 53 - protein, 326 aa, Artemisia tridentata
MASNSDPYKIFNMTQSDLDKIFNVTQNPDGSVTRPTGFPSSPDNPELTLFKDIPLNTTNNTFLRLYRPVSRTTQKLPIIIYFHGGGFVFSSATDAYVHNACSNISTHSPALVISLEYRLAPTHRLPAAYDDGVDAIKWVRDQVLMSKVEDCDEWLNEFGDFSKVYLMGTSAGGNLTYQAGLRALELDLDPILIVGLIMDQPSLGGVERTDAELRRINDHVIPLTATDFMWSFALPLSSDRDHEYANPLKDHHKSSNEIIKRLPMCMIRMNGDDPMIDRQKDFANILENHGVHVTRKSYEDSCHGVETVDPKKAQILYDDVKNFIWN

SEQ ID NO: 54 - DNA, 1159 bp, Artemisia tridentata
ggtcaatatcatgtggagattgttgtatgcaacaatgactaacccagaatccagtaacaaattcttcagactcacacaaaatccagatgggtcagtgactcgactcagcaagattccatctttacccgcgactcctctatggacgactgagtctcaacttactctttctaaagacataccactcaatcccaccaacaaaaccttcctacgccttttctgtcctgtctcaccgcccaaaaacacgaacacaaaactcccaatcatcatttacttccacggtggcggttttgtcttctatagtgctacctcttttaacttccacaaattttgttccgcggtgtctgctcatacacccgcggtggtattctctgttgagtatcgtcttgcacctgaacaccgcctccctgcagcgtatgatgatgccagggaggcattgttgtgggtgcgtgatcaggctttagggatcagttgttgtgatgattggttgagtgagctcgttgacttttctacagtgtttttgatgggaagcagttcaggtggaaatatagtgtataatgcaggtttgcgagcccttgatcatgatcttcatccgatcaagattgcagggcttataatgaaccaaatatattttggtggtgtcgaaagtactcaatctgagcttcgactagcaaatgaccgtattctacctttgcatgcaaatcatgtcatgtggtctcttgcactgcctgaaggttgtgacacagaccacgagtgctctaacccgttacaagataacaatatatctcgtaatggaaagatcacacaactgccgaaatgtctagtaataggttataacagggacccgctagttgataggcaaagagcatttgcaaatatgttagaagcatgtggtgttcaagtgaaaaagaaatttgatgatgaagggtaccatatggtagagttctttgacccccaaaacgcaaaagtgttgtatgatgatatcaagagtttcatcagctctcttgagaagaagatgtcaagtttatgaataattgttgaaattggctggttgaaggtggttgtttgaatggatcctcaataacggttatatgtattacgcgcttgtttttaaatgttatacaatatgtgtttttttctatcgaaaaaaaaaaaaaaaaaa

SEQ ID NO: 55 - protein, 338 aa, Artemisia tridentata
MWRLLYATMTNPESSNKFFRLTQNPDGSVTRLSKIPSLPATPLWTTESQLTLSKDIPLNPTNKTFLRLFCPVSPPKNTNTKLPIIIYFHGGGFVFYSATSFNFHKFCSAVSAHTPAVVFSVEYRLAPEHRLPAAYDDAREALLWVRDQALGISCCDDWLSELVDFSTVFLMGSSSGGNIVYNAGLRALDHDLHPIKIAGLIMNQIYFGGVESTQSELRLANDRILPLHANHVMWSLALPEGCDTDHECSNPLQDNNISRNGKITQLPKCLVIGYNRDPLVDRQRAFANMLEACGVQVKKKFDDEGYHMVEFFDPQNAKVLYDDIKSFISSLEKKMSSL

SEQ ID NO: 56 - DNA, 1132 bp, Lamium amplexicaule
acttccctagcctagctacaaaatgtcttccgatcctttcactgatccatatggttacatgggcctcactatagcccgtatacctaactattttccgacaacccccgcctcttcggatcctcgtaaccctgttctcaccaaggatgtcactatcaacgaacaaaaccaaacatggggtcgtgtgtacctaccccgggatgcctcccccacatcaaaactgccccttatagtttattttcacagcggaggcttcgtggtacacagtgctgcttcatcggtttaccagaagttttgcagttatattgtcatgaagatgcccgcagtcatggtgtcggtggagtaccgtcttgccccagatcaccgcctccctgctgcctatgatgactccatggaagccctgcattggatcacaaccagtaatgacgactggctcacaaactacgtcgatttatcaaggtgttttctgatgggaagtagcgccggaggaaatatagcgctgcgcgtgggtttaaatgtggtggcggcacatgtggatcatttgttgcctctaaagattagagggttaatattgcatcaagccttctttggaggtgtggagaggaccccatcggagataagattgatgaaagataagatggtgccgccgcattttaatgatttagcatgggctctttcgttgccgattggggttgaccgggatcaccagtattcaaatccgataaagaatattcaggtggtggaattagagcgggtgaaggaaaaaggatggaggtttttggtgaccggtgatgagggtgacccattggtagatcggcaaattgaagctgccaaagtgttggagaatggtgtggctgttaccgacatgtttagagatgggggatctcatggaattgatttttatgatgaccctaaagctaacatgttttatgctcttttaaagaattttctgcttactttgtaatcttcctattcgtcccacaaaaataatcatgttttaagttttgtaccaatgactaaaaataatacttattgtacaccaccaatcaataaaattgagtagtcacaatatcatttttttttgacagaagtgattgtttttataaagaaaaaaaaaaaaaaaaaaaaaaaaaaa

SEQ ID NO: 57 - protein, 312 aa, Lamium amplexicaule
MSSDPFTDPYGYMGLTIARIPNYFPTTPASSDPRNPVLTKDVTINEQNQTWGRVYLPRDASPTSKLPLIVYFHSGGFVVHSAASSVYQKFCSYIVMKMPAVMVSVEYRLAPDHRLPAAYDDSMEALHWITTSNDDWLTNYVDLSRCFLMGSSAGGNIALRVGLNVVAAHVDHLLPLKIRGLILHQAFFGGVERTPSEIRLMKDKMVPPHFNDLAWALSLPIGVDRDHQYSNPIKNIQVVELERVKEKGWRFLVTGDEGDPLVDRQIEAAKVLENGVAVTDMFRDGGSHGIDFYDDPKANMFYALLKNFLLTL

SEQ ID NO: 58 - DNA, 1209 bp, Delosperma nubigenum
aaaaaggcaccacaaccaaaatcaaacttgctcatcatgtcatattcttccattcttgtaagggagagaatgaaaccatacgcaagtcgagcaatcgtattaatctccctctcagtctctctcctcttcatcactctcttccctcctcaattcacccctcaacccaaaaatatgtcgcaacccccaattccccacactcctatcgacgcatacgaccgtctccacatcgtcctcaactccgaatccaacatcactcgtctcacggattatttccccaccgtccctccctcttcgcctcactccaaagacgtcactctcaacccgctaacacgtacctcactccgcctctttctcccccgggtcgggttcggatccggatcttacccgaggaagaagatcccgatcgtggtgtttgtccatggcggcggatttattgttgggagcgccgcccagccggagtacaacgagttctgctccgccgccgccgaacaccttgctgcgctggtggtttccgtcgagtaccgcctggcccccgagcaccgcctccccgcggcatacgacgacgttttggaggcgttgacttgggtcaaagaagggaaggatgagtgggtgagagactatggggatttatcgaggtgtgttatgatgggggacagtgcagggggtaacatagtctatcattccgggttgcgggtcgcgggtcgggtcgatgagtttaagccgttggttattcgtggcctggttttggtccaaccgtatttcggcggggatgacccgaccgcgtccgagatccgattggagcatgattcggttctgcctagtgatatgaatgaagtgatgtggaatctttctttgcccgttggggcgaatcggtctcatgagtatggagacccgactttgggtggcgggtcggagtttatgtacaagattcgggatttggagtggcgggtcggagttgtggcttcgggtggggattcgctttatgaccgggatttggagtttgctagaatgttggagaataaagggttgattatgaagtgtttgattactaaggatgatcaacatggagcgtttctttcggatgaaaatcataagagaacggatttgcttgattttgtaatgggtattctctcttaattttgatgagaaatgtaaacttgtatcttgtatgagggttgagaatatgcaaaaaaaaaaaaaaaaaaaaaa

SEQ ID NO: 59 - protein, 366 aa, Delosperma nubigenum
MSYSSILVRERMKPYASRAIVLISLSVSLLFITLFPPQFTPQPKNMSQPPIPHTPIDAYDRLHIVLNSESNITRLTDYFPTVPPSSPHSKDVTLNPLTRTSLRLFLPRVGFGSGSYPRKKIPIVVFVHGGGFIVGSAAQPEYNEFCSAAAEHLAALVVSVEYRLAPEHRLPAAYDDVLEALTWVKEGKDEWVRDYGDLSRCVMMGDSAGGNIVYHSGLRVAGRVDEFKPLVIRGLVLVQPYFGGDDPTASEIRLEHDSVLPSDMNEVMWNLSLPVGANRSHEYGDPTLGGGSEFMYKIRDLEWRVGVVASGGDSLYDRDLEFARMLENKGLIMKCLITKDDQHGAFLSDENHKRTDLLDFVMGILS

SEQ ID NO: 60 - DNA, 563 bp, Peperomia caperata
gcaatgcgggtctgtgagcttgacctgagcccggtccgggttgctggggtgatactgaaccaaccctttttcggcgggatggaacgaaccgaatcggacgtcgaaaacgggtcgggtggggttataccacttgcagtgaccgacaagttatggaaggatgtcctacccgaggggtcagaccgggaccatgtgtactgcaatccggagtcggggcagtggcagctgggtaggcttccgaggtgtatggtttgtgggtattttggtgacccagtggtggaccggcaaagggctctggctcggaggttgaaggcgagtggggtcgatgtggtcgagcggtttgttgatgggtctcatgggagtgactacatagaaccggagaaaggccatgaaatgctcgaggctactaagaaatttattttagagaccgagtgagtacaatgtaaaggaactacacaattatatgccacattagtgatcgcttgctataatttgtgatgttatgtgcaagtattatagcaacttactataatgaattacacatcgtaaaaaaaaaaaaaaaaaaa

SEQ ID NO: 61 - protein, 320 aa, Peperomia caperata
MEGEGRSDPNTVEEIDLYKLLKIVRNPDGSLTRFTDHSLLYTNPNPIRASFKDITYDPAHNVWLRLYRPSTDPDRSGSKLPVLVYFHGGGFIICSVDTPPFHSACAERSEEIPAIVVSVEYRLAPENRLPAAYDDSTRAIEWIRDEWTSEPWLSNLADPNRVFIMGSSAGGNIAFHVAMRVCELDLSPVRVAGVILNQPFFGGMERTESDVENGSGGVIPLAVTDKLWKDVLPEGSDRDHVYCNPESGQWQLGRLPRCMVCGYFGDPVVDRQRALARRLKASGVDVVERFVDGSHGSDYIEPEKGHEMLEATKKFILETE

SEQ ID NO: 62 - DNA, 990 bp, Arabidopsis thaliana
atggaagctcctccaccttcaagcgatccatacaagttcctcaacattacacttaactcagatggatctctcaccagacaccgtgatttccccaaactgcccccaacagagcaatccaaagacataccattaaaccaaaccaacaataccttcatccgaatcttcaagccacggaatattccgccggaatccaaacttccgatcctcgtttactttcacggcggtggatttatcctctacagcgccgcttcagctcctttccatgaatcttgcaccaaaatggctgatcgtcttcaaactataatcctctccgtcgaataccgtctagctcccgaacaccgtctcccggcggcgtacgaagacgccgtcgaagctatcttatggctccgtgatcaagctcgtgggccaatcaacggtggtgattgcgacacgtggttaaaagacggtgtcgatttctcgaaatgctacgtcatgggttcaagctctggaggaaatattgtctacaacgtggcgttgcgtgtagttgacacagatctttctcctgttaagatccaagggctgataatgaaccaagctttcttcggtggcgttgagccgtcggattctgagtcacggcttaaagacgataagatctgtccgttaccagctactcacttgttgtggtcactttgtttaccggacggtgtagatcgtgaccacgtgtacagtaatccaattaagagcagtgggcctcaggaaaaagataagatgggacgttttccgtcgactcttatcaacggttacggtggggatcctttagtggatcgtcagagacacgtggcggagatgttaaagggacgtggagttcacgtggagacgaggtttgataaagatgggtttcatgcttgtgagttgtttgatgggaacaaagctaaggccctgtacgaaaccgttgaggcctttatgaagagttgttcatcaactggcccatcgtccaactccaacatgtag

SEQ ID NO: 63 - DNA, 990 bp, Artificial Sequence
  At-cxe8ac
atggaggctccacctccgtcatcagacccatacaagttcctgaacatcacgctcaactccgatggttctctgacgaggcacagggactttccgaagctgccaccaaccgagcagtcgaaggacatccccctcaaccagaccaacaacaccttcatccgcatcttcaagccgcggaacatcccacccgagtccaagcttccgatcctcgtgtactttcacggcggaggcttcatcctctactccgcagcgtccgcgcccttccatgaatcttgcaccaagatggccgacaggctccagaccatcatactgagcgttgagtaccggctcgcgccagagcacagacttcccgctgcctatgaagatgccgttgaggccatactttggctcagagatcaagcgaggggcccgatcaacggaggtgattgcgatacgtggctgaaggatggcgtggacttctcgaagtgctacgtgatgggcagcagctccggtgggaacatcgtctacaacgtcgctcttagggtggtggataccgacctgtcccccgtcaagatccaagggctcatcatgaaccaggcattcttcggcggagttgaaccctcagactcggagtcccggctcaaggatgacaagatttgcccgctgcccgcaacgcatctgctctggagcctctgtctgcctgacggcgttgatagggaccatgtctactcaaacccgatcaagagctccggtcctcaggagaaggacaagatgggacggttcccgtccacgctgatcaatgggtatggcggtgatccgcttgtcgatcgccagcggcacgtcgcggaaatgctgaagggtcgcggcgtccacgtcgagactcggttcgataaggacggcttccacgcttgcgaactgttcgatggcaacaaggctaaggccctctacgagaccgtcgaagccttcatgaagtcctgctccagcacaggaccctccagcaacagcaacatgtag

SEQ ID NO: 64 - protein, 329 aa, Arabidopsis thaliana
MEAPPPSSDPYKFLNITLNSDGSLTRHRDFPKLPPTEQSKDIPLNQTNNTFIRIFKPRNIPPESKLPILVYFHGGGFILYSAASAPFHESCTKMADRLQTIILSVEYRLAPEHRLPAAYEDAVEAILWLRDQARGPINGGDCDTWLKDGVDFSKCYVMGSSSGGNIVYNVALRVVDTDLSPVKIQGLIMNQAFFGGVEPSDSESRLKDDKICPLPATHLLWSLCLPDGVDRDHVYSNPIKSSGPQEKDKMGRFPSTLINGYGGDPLVDRQRHVAEMLKGRGVHVETRFDKDGFHACELFDGNKAKALYETVEAFMKSCSSTGPSSNSNM

SEQ ID NO: 65 - protein, 324 aa, Arabidopsis thaliana
MSRDSPPAFDPYKHLNITINPNGSCTRHFVWPRVEPDPDPCPGKLAASKDVTINHETGVSVRIFRPTNLPSNDNAVARLPIIIHLHGSGWILYPANSAANDRCCSQMASELTVIVVSVHYRLPPEHRLPAQYDDALDALLWVKQQVVDSTNGEPWLKDYADFSRCYICGSSNGANIAFQLALRSLDHDLTPLQIDGCVFYQPLFGGKTRTKSELKNFADPVMPVPAVDAMWELSLPVGVDRDHRYCNPLGYLPQKEKVGRLGRCLVIGYGGDTSLDRQQDFVNLLVAAGVRVEARFDDAGFHSIELVDPRRAVALLNMIRDFIS

SEQ ID NO: 66 - protein, 335 aa, Arabidopsis thaliana
MATDSQPNQKLTLPLKTRIALTVISTMTDNAQRPDGTINRRFLRLFDFRAPPNPKPVNIVSTSDFVVDQSRDLWFRLYTPHVSGDKIPVVVFFHGGGFAFLSPNAYPYDNVCRRFARKLPAYVISVNYRLAPEHRYPAQYDDGFDALKYIEENHGSILPANADLSRCFFAGDSAGGNIAHNVAIRICREPRSSFTAVKLIGLISIQPFFGGEERTEAEKQLVGAPLVSPDRTDWCWKAMGLNRDHEAVNVGGPNAVDISGLDYPETMVVVAGFDPLKDWQRSYYEWLKLCGKKATLIEYPNMFHAFYIFPELPEAGQLIMRIKDFVDERVASLSA

SEQ ID NO: 67 - protein, 330 aa, Oryza sativa
MGDVTAAAAPSTDKSNNLFMQIVVHPDGTITRPFVPDAPPSATGPVLSRDVPLDASLATSLRLYLPNPASPPPPPTSKLPVILYFHGGGFVLFSTGSVFYHASCEAMAAAVPAIVVSLDYRLAPEHRLPAAYDDAASAVLWLRDAAAGDPWIAAHGDLSRCFVMGSSSGGNMALNAGVRACRGLDLGPAAVRGLVLHQPYLGGVARTPSEEKSGDDAVLPLEANDKLWSLALPAGADQDHEFSNPAKSMAAAAAALTGLPRCLVTGSDGDPLIDRQRELVAWLRGHGVEVVAKTDFAGSHAAELFVKETADELFAAVCAFVSGAGDVVHS

SEQ ID NO: 68 - protein, 326 aa, Oryza sativa
MDPYKYLNIRFNPDGSLTRNGAARLLPPAPAGEPVDGVNGPARRIVHSNDAPLNDANGTTVRLFVPSGPCVGADGGGRLPLVLYFHGGGYVLFRAASEPFHNTCTALAATIPAVVASVDYRLAPEHRLPAAFEDAADAVRWVRSYAAGCRPLFLMGSHAGASIAFRAALAAVDEGVELRGLILNQPHHGGVKRTAAEESSVDDRVLPLPANDLLWELALPLGADRDHEYCNPETMLAGVDAARLRRLPPCLVLGRMKDPPRDRQRTLVEALQKAGVTVEAKLDGAGYHAMELFKEDRAAEFIAQVTDFVRRHTGAGSDVHAGRSRL

SEQ ID NO: 69 - protein, 363 aa, Oryza sativa
MTRTETGEMGHEKEQETAGDELRRPEPPALPWTVRLQLFALVTAVDIVQRGDGTVNRFLFSLADRQSAAAARPDAHGVRSGDVTVDASRGLWARVFSPASSSAVESPPLPVVVYFHGGGFALLTAASSQYDALCRRLCRELRAVVVSVNYRLAPEHRYPAAYDDGVDVLRHLATVGLPADVVAAVPVDLTRCFLVGDSAGGNIAHHVAHRWAAATTSSSRRVRLAGVVLLQPFFGGEERTEAELRLDGVGPVVSMARADWCWRAFLPEGADRDHPAAHVTGENAELAEEFPPAMVVVGGYDTLQDWQRRYAGMLRRNGKAVQVVEYPAAIHSFYVFPELADSGELVKEMKAFMERNAPPKSNA

SEQ ID NO: 70 - protein, 345 aa, Oryza sativa
MAGVDRSRRSSSSPPPLPWTVRVQLAALSAAHRSDGSVRRLLFYLGDLHAAASPRPDAAGVRSVDVTIDASRGLWARVFCPPTNTAAVKLPVVVYFHGGGFVLFSAASRPYDALCRRISRGVGAVVVSVNYRLAPEHRFPAAYDDGLAALRYLDANGLAEAAAELGAAVDLSRCFLAGDSAGGNIVHHVAQRWAASTTSPSSSLRLAGAVLISPFFGGEERTEEEVGLDKASLSLSLARTDYFWREFLPEGATRDHAAARVCGGERVELAEAFPPAMVVIGGFDLLKGWQARYVAALREKGKAVRVVEYPDAIHGFHAFPELADSGKLVEEMKQFVQEHSSNRMA

SEQ ID NO: 71 - protein, 362 aa, Oryza sativa
MGGKMGKDVAAGGESNRRPPPPPPMPLGLRLQLIGLSAAIDAVERRDGTVNRALYSVLVEHLMSVRADPSPDAATGAVRSFDFTIDAARGLWARVFAPAAAAQAAAPMPVMVYYHGGGFALFSPAVAPFDGVCRRLCGDVGVVVVSVNYRLAPEHRYPAAYDDGVDALRFLDGNGIPGLDGDVVPVDLASCFLAGESAGGNIVHQVANRWAATWQPTAKNLRLAGMIPVQPYFGGEERTPSELALDGVAPVVNLRRSDFSWKAFLPVGADRDHPAAHVTDENAELAEAFPPAMVVIGGFDPLQDWQRRYVDVLRRKGKAVEVAEFPDAFHGFYGFPELADAGKVLQDIKVFVQSNRAARATA

SEQ ID NO: 72 - protein, 341 aa, Sorghum bicolor
MGDITATATADASGPPTLTKETNLFMQIVVNPDGTVTRPEVPLVPSSEAAAAGGGGLGRGVISRDVPLDASAGTYLRLYLPSRSPATSSDAKLPVVLYFHGGGFVILSPATVFYHGHCEAMAAAVPAIVASLEYRLAPEHRLPAAYEDAAAAVAWLRDGAPGDPWVAAHGDLSRCFLMGSSSGGNMAFFAALRTGGLDMAPATVRGVLLHQPYLGGVDRTPSEAGSEDDFMLPLEASDRLWSLALPLGADRDHEFCNPVKAMAPEALAGLPPRCLVTGNLDDPLIDRQREFARWLQDHSGAAEVVVKTDVAGFHASELFVPEIAEVLFAAMREFLSTGDAA

SEQ ID NO: 73 - protein, 331 aa, Sorghum bicolor
MDPYKYLKIRFNPDGSLCRYGEAPLLPAAPAGEPVTVEDDQGARRIAVHSNDVPLNDATGTGLRLFVPSVSGGHHDRLPLIVYFHGGGYVLFRAASEPFHNTCTALAAAGPAVVASVDYRLAPEHRLPAAFEDAADAVLWARPHAAAGRPVFVMGSHNGASIAFRAALAAADAGVELRGVILNQPHLGGAERSPAEAASVDDRVLPLAANHLLWELALPVGADRDHEYCNPEAMLARVGAARLRRLPPCLVLGRRKDPPRDRTRTLVNALRKAGVAVEARLDGAGYHAMELFKANCAAEFTAQVADFVRRHSSADTGASASAGDVVGMSKL

SEQ ID NO: 74 - protein, 338 aa, Glycine max
AMSLKSVTVLTTYLIYASIVAKSAMDPYKALNIILNPNGTLTRLSIPPQSPPSPDPTLPTAVLSKDLTINQSKHTWARIYLPHKALDYSPNTNSKLPLIVFYHGGGFLFYSANSTYFHDFCVRMANDTQSVVVSVDYRLAPEHRLPAAYEDSVEALHWIKSSNDPWLRHADYSRCYLMGESAGGNIAYTAGLRAAAEVDQIKPLKIKGLILIQPFFGGTKRTPSEVRLAEDQTLPLPITDLMWNLSLPVGVDRDYEYSNPTIKGGAKILDRIKALGWKVAVFGVEGDPLVDRERELVGLLQHKGVQVVGLFYQGGRHGIFVGDPSMSVKVFDLLKTLH

SEQ ID NO: 75 - protein, 329 aa, Glycine max
MDRRTMSMMSSKVDPFQHLKLVPNSDGTITRQRDDPPISPSLNPTLPVLTQDATINRSNNTFARIFLPREALDSSPSNNLPLVVYFHGGGFVLFSAASDFFHDACVNLADDTNSIVVSVEYRLAPEHRLPAAYEDAVEALHWIKAQSNDWLRNHADFSNCYLMGSSAGANIAYHVGLRVAAELNVYGDNYLAPLKIRGLILSQPFFGGTKRVPSEVRLVDDPVLPPHVCDLLWELSLPLGVDRDHEYCNPTAGDGPVILDRVRQLAWRVLVSGCHGDPLLDHQMALARLIEEKGVAVVTRFDQGGCHGIEVRARKHQNQLYNLVKDFIA

SEQ ID NO: 76 - protein, 318 aa, Glycine max
MSKQPIDPFRHINIVLNPNGTLNRLRHIPSTAPSSDPTLPVLTKDITINQQNNTWLRLFLPRIALSPNPKKLPLIVFFHGSGFIVTSAASTMFHDFCAAMSAAVPAVVASVEYRLAPEHRLPAAYDDAAEALEFIRDSSEEEEWLTKHADMSNCYLMGSSAGATIAYFAGLRATDTASDLSPLKIRGLILRQVFFGGTQRSKSEVRLENDEVLPLCVTDLLWELALPVGVDRDHEYCNPRAEKWVGKMGKMRELGWRVLVSGNGGDPVIDREKDLVLLLEEKGVVVVSDFDEEGCHGVEFGDESKANQLIQVVKRFVS

SEQ ID NO: 77 - protein, 334 aa, Glycine max
MSEPPPPSSSAMDPYDFLKIKLNPDGNSLTRNYVVPTVPPSATTPSSEPALSKDIPLNPTTNTSLRLFLPNPPPPSAAKLPLIIYFHGGGFILYHPSSLIFHRSCAALAASLPAIIASVDYRLCPEHRLPAAYHDALEALHWAQAQAQAQAQSDPWLRDYVDFSKTFLMGSSAGGNIAFFTALNSLSLSLSPLKILGVIMNIPYFSGVHRSDSELRLVDDRILPLPANDLMWSLSLPEGADRDHVYCNPTAVDNEHGDAIGRLPPCFINGYGGDPLVDKQKELVKILEARGVRVDARFVEDGFHAVELFDQAKAFALGQNIKNFILSITSQSSM

SEQ ID NO: 78 - protein, 319 aa, Glycine max
MSKFDPYTHLGITINPDGTVTRAVKTPTVDANPDPSPGTATVSKDITLDSNKETWVRIFRPTRLPSNDNTVARLPIVIYFHNGGFLFLSPAAPGCHKKCTQIASDFPSIVVSASYRLAPENRLPAMYQDARDAVLWVKEQMNDPNGEQWLKDYGDASRVYIYGCDSGANIAFNVSMQVADLDLDPLRIRGLVINQPMFGGEKRTASELRYATDQTLPLPVLDVMWNLTLPKGTDRDHRYCNPMMKGPHLDNVRKLRKCLVVGYNGDIMVDRQQEFVTMLVKCGVQVEARFDQVGFHNIDMVDVARASSIINIAKDFILG

SEQ ID NO: 79 - protein, 319 aa, Glycine max
MSKFDPYTHLGITLNPDGTVTRAFKAPTVDANPEPSPGTTTVSKDITLDTQKETWVRIFRPTRLPSDHNTVARLPIVIYFHNGGFLFHSPANLSCHKKCTQIASDVPSVVVSASYRLAPENRLPAMYHDARDAVLWVKKQMNDPNGEQWLKDYGDASRVYIYGCDSGANIAFNVSMQVADLDLEPLRIRGLVMNQPMFGGEKRTGSELRYATDETLPLPVLDLMWYLTLPKETDRDHRYCNPMVKGPHLDNVKKLRKCLVIGFHGDIMVDRQQEFVTMLAKWGAQVEARFDQVGFHNIDMVDAARASAIINIAKDFILG

SEQ ID NO: 80 - protein, 286 aa, Glycine max
MSKQPIDPYKHLDMVLNLNGTLTRLRHIPHTAPSSDPTLPVLTKDLTINQQNNTWLYLFLPRIALSPNPKNATSTMFHHFCAPMSAAFPAVVTSVKYHLAPEHHFTTTYDDTLTKHANMSSCYLMGSSVRATIAYFMGLRAIDMARDLEPLKIRGLILCQVFFGGTQRCESEIRLKDDEVVPLCVIDMFWELALPVGVNRDHEYCNLRVEKWVGKLGMMKELGWRVLVSGNDGDPVIDREKDLVVLLEEKGVDVVSDFDIDGCHGVEYADESKANQLILVVKRFVS

SEQ ID NO: 81 - protein, 327 aa, Arabidopsis thaliana; identical to SEQ ID NO: 18

SEQ ID NO: 82 - protein, 329 aa, Zea mays; identical to SEQ ID NO: 21

SEQ ID NO: 83 - protein, 329 aa, Zea mays
  misc_feature (219)..(219): Xaa can be any naturally occurring amino acid
MGDVAAGAAALSPPPMTKETNLFMQIVGNPDGTVTRPEVPLVPASAEATGGVISRDVPLDASAGTYLRLYLPDPSSAPAAKLPVVLYFHGGGFVILSAATVFYHGHCEAMAAAVPAIVASLEYRLAPEHRLPAAYEDAAAAVAWLRDGAPGDPWVAAHGDLSRCFLMGSSSGGNMAFFAALRTGGLDLGPATVRGLLLHQPYLGGVDRTPSEARSVDDXMLPLEANDRLWSLALPVGADRDHEFCNPVKAMAPEALAGLPRCLVTGNLGDPLIDRQREFARWLQDRGGAEAEVVVKLDVAGFHASELFVPEIAEVLFAAMREFVYTGDA

SEQ ID NO: 84 - protein, 357 aa, Zea mays; identical to SEQ ID NO: 23

SEQ ID NO: 85 - protein, 357 aa, Zea mays; identical to SEQ ID NO: 23

SEQ ID NO: 86 - protein, 370 aa, Zea mays
MRRRRMGALHVVGEPRISFRQQPAAVVAKNGGHGAVVEEIHGLIRVYKDGHVERLPAIPAVPCTWGGTAPDAPGGVVARDVVVDPATGVWARLYAPTSAGDGARRPVVVYFHGGGFCVGSAAWSCYHEFLAQLAARAGCAVMSVDYRLAPEHRLPAAFDDGLAAVRWLRHQAAASASASACCNDDLSWWRARCGFDRVFLMGDSAGASIALHVAARLGQGQLGALPPLTVRGAVLIQPFLGGEGRTASEKNVAQPPRSALTLATSDCYWRLALPAGASREHPWCNPLSGRAAPRLETTPLPPLLVCVSETDILRDRNLELCRALREAGKRVEQAVYGGVGHAFQVLHNCHLSQPRTQEMLAHIKAFVSAR

SEQ ID NO: 87 - protein, 373 aa, Zea mays
MRRRRMGALHVVGEPRISFRQQPAAVVAKNGGHGAVVEEIHGLIRVYKDGHVERLPAIPAVPCTWGGTAAPDAPGGVVARDVVVDPATGVWARLYAPTSAAAGDGARRPVVVYFHGGGFCVGSAAWSCYHEFLAQLAARAGCAVMSVDYRLAPEHRLPAAFDDGLAAVRWLRHQAAASASASACSNDDLSWWRARCGFDRVFLMGDSAGASIALHVAARLGQGQLGALPPLTVRGAVLIQPFLGGEGRTASEKNVAQPPRSALTLPTSDCYWRLALPAGASREHPWCNPLSGRAAPRLETTPLPPLLVCVSETDILRDRNLELCRALREAGKRVEQAVYGGVGHAFQVLHNCHLSQPRTQEMLAHIKAFVSAR

SEQ ID NO: 88 - protein, 341 aa, Zea mays; identical to SEQ ID NO: 27

SEQ ID NO: 89 - protein, 341 aa, Zea mays; identical to SEQ ID NO: 27

SEQ ID NO: 90 - protein, 345 aa, Oryza sativa; identical to SEQ ID NO: 70

SEQ ID NO: 91 - protein, 376 aa, Zea mays
MGGSDDHARRKPSLPWTVRVQLAALALVHRRDGSVRRLLFSLGDLKSGTTSRPGASGVRSADVTIDASRGLWARVFSPSSGADADAAAAPVPVVVYFHGGGFVLFSAASRPYDAFCRRLCRGLRAVVVSVNYRLAPGHRFPAAYDDGVAALRYLDANADSLPAHVPVDLSSCFLAGDSAGGNITHHVAQRWAVAAVSPTNLRVAGAVLIQPFFGGEERTAAEVALDGASALSVAATDHFWKEFLPEGATRDHEAARVCGEGVKLADAFPPAMVVVGGFDLLKDWQARYVEALRGKGKPVWVVEYPDAVHGFHVFPELTDSGKFVEEMKLFVQEHKSTNTKRAVYQGQRSLGASDCPVVHRTVSANGSQAPTVGFAK

SEQ ID NO: 92 - protein, 326 aa, Oryza sativa; identical to SEQ ID NO: 68

SEQ ID NO: 93 - protein, 331 aa, Sorghum bicolor; identical to SEQ ID NO: 73

SEQ ID NO: 94 - DNA, 963 bp, Peperomia caperata
atggaaggagaaggaagatcagacccaaatacagtagaggagattgatttgtacaagttatttaagatagtccgaaacccagatgggtcactcacaaggtttacagaccactctctactctacacaaaccccaacccgatccgggcatccttcaaggacattacctacgacccggcccataatgtctggttacgcctctatcggcccagcaccgacccggaccggtccggttcaaaacttcctgtcctcgtttacttccacggtggagggttcataatttgcagcgtggacacgccacccttccacagtgcatgtgctgagcggtctgaagaaattccggccattgttgtgtcagtggagtatcggctggctccagagaataggcttccggcggcctatgaagactcgacccgagccatcgagtggattcgagatgagtggacgagcgaaccatggctgagtaacctggccgacccgaatcgggttttcataatggggtccagtgcaggtgggaacattgccttccacgttgcaatgcgggtctgtgagcttgacctgagcccggtccgggttgctggggtgatactgaaccaaccctttttcggcgggatggaacgaaccgaatcggacgtcgaaaacgggtcgggtggggttataccacttgcagtgaccgacaagttatggaaggatgtcctacccgaggggtcagaccgggaccatgtgtactgcaatccggagtcggggcagtggcagctgggtaggcttccgaggtttatggtttgtgggtattttggtgacccagtggtggaccggcaaagggctctggctcggaggttgaaggcgagtggggtcgatgtggtcgagcggtttgttgatgggtctcatgggagtgactacatagaaccggagaaaggccctgaaatgctcgaggctactaagaaatttattttagagaccaagtga

SEQ ID NO: 95 - protein, 320 aa, Peperomia caperata
MEGEGRSDPNTVEEIDLYKLFKIVRNPDGSLTRFTDHSLLYTNPNPIRASFKDITYDPAHNVWLRLYRPSTDPDRSGSKLPVLVYFHGGGFIICSVDTPPFHSACAERSEEIPAIVVSVEYRLAPENRLPAAYEDSTRAIEWIRDEWTSEPWLSNLADPNRVFIMGSSAGGNIAFHVAMRVCELDLSPVRVAGVILNQPFFGGMERTESDVENGSGGVIPLAVTDKLWKDVLPEGSDRDHVYCNPESGQWQLGRLPRFMVCGYFGDPVVDRQRALARRLKASGVDVVERFVDGSHGSDYIEPEKGPEMLEATKKFILETK

SEQ ID NO: 96 - DNA, 1292 bp, Peperomia caperata
cttccttcttttctcctcctcctttcctcttttagaagttaagattcagaaattcatggaaagagatggaaaatcagactcacttgcatcggaagaaattgatccatacaagttcctcaacatagtacagaacccagatggaaccctcacaaagcccataactcaccctttgctctacaaaagccccaacccgattcgagctcccttcaaagatatcacctacaacccgaccagcaatgtccggctccgactctatcggccccatgatgacgtggacctatcgggtggaaggcttcctgtcctcgtctacatccacggtggaggctttgtcctctttagtgtctcaactttccacgtggcatgcggtgataggtcggacgagattccggccattgtggtgtcggtggagtatagactcgctccggaggataagcttccggcagcctatgatgatgcaatcaatgcgatcaagtgggtccgggatgagtgggccaatgagccatggctaacagatcttgcggaccccaatcgggtttttatcattgggtccagcgctggtgggaacatagccctacacgtggcattgtgggcccaaaatcatgacctcaacccaattcggatcattgggattataatgaaccagccgtttttcggtggggtggagcgaaccgaatcggaggtcaaaaatggggcgggtggttcactgccgttggtggtgactgacctaatgtgggagctggccctgcttgtaggagctactcgagatcatgagtactgcaatcttgagtcgggtcagtggtttataggaaggctttcaaggtgtatgatttgtggattttcaggtgacccggtattcgaccgacaaagggggttggtccggctcttgaaggcgagtggaaccgatgtggttgagcagtttgaagaaggagggtttcatggtatcgattatgttgatccaaagaaaggtgaggaattactcggatcaatcaagaaatttataagagaaactaaatgagaaaaaatttgtttgttgagctttggaagtgcgtgttgcattggttgtcacatgtagtaatgtatgatgtttcctttgtttcattttatttatgcctgaaaggatatatatggttcaatctatgtttaaaaaaaaatggatgaatgtacctgggcaatgtaatttctttcagaaaaagaaaaaaataataaaactctcattgtaatagctttggagatactgataatataaaactattacgagaagtcccactataaaaaaaaaaaaaaaaaaaaaa

SEQ ID NO: 97 - protein, 319 aa, Peperomia caperata
MERDGKSDSLASEEIDPYKFLNIVQNPDGTLTKPITHPLLYKSPNPIRAPFKDITYNPTSNVRLRLYRPHDDVDLSGGRLPVLVYIHGGGFVLFSVSTFHVACGDRSDEIPAIVVSVEYRLAPEDKLPAAYDDAINAIKWVRDEWANEPWLTDLADPNRVFIIGSSAGGNIALHVALWAQNHDLNPIRIIGIIMNQPFFGGVERTESEVKNGAGGSLPLVVTDLMWELALLVGATRDHEYCNLESGQWFIGRLSRCMICGFSGDPVFDRQRGLVRLLKASGTDVVEQFEEGGFHGIDYVDPKKGEELLGSIKKFIRETK

SEQ ID NO: 98 - DNA, 1231 bp, Linum perenne
aaaattcaccgccggccacaccatgaaaccttaccaccgcgtcttcttaaccccaaacccggacggaaccttaacccgacccaactccaccgagcccagaaccgacccatccatcgacccgacccaacccgtcctctccaaagacatccaaatcaacgaatcgaaacaaaccttcctccgcctcttcctccccaatcaaatttccgattccgatccgaaatcgaagctgcctctcctgatctacttccacggcggcggattcatcatctgcagcccgtcatcgaccttcttccacgactactgctccaacgccgccgtccagctccccgccgtcgtcgcctccgtcggctaccgcctcgcaccggaacaccgcctccctgccgcgttcgacgatggtctcgaggcgatccggtggatcgcgtcgagaggttgtgaggaggatccgtggctgagagattatgtggattttggaaactgctttctcatggggattagcgccggcgggaatcttgcgtaccacgtcggcctccatgcggcggctgaattcggtgatcctggtcacgttcctcggatgaagatccgagggttgatactacaccacccgttcttcggcggtgtggacaggaccgaatccgaaaaggcgttaataaacgacaccgtattacctctcgatctcgccgatctgtgttgggagttgtgcctgccggccggcgcagatcgtgaccacgagtattctaatccgacggctggtggggcctccgtttcaatggagaagatcaggaccgttggatggaaggtggctgtgattggctacgaaggggacccactcgtggacaagcagaaggaagttgcaaatgtattggaggagaaaggtgtcgacgtggcgaggtattttgcgagtggtgggtcccacgggttggaggttagtgacgtggagaaagggaaggagtttaacgatggagtactcaaggagtttgttatgtcttgtttggtcacttgagatgtttttttttagtgttgaggtctcttggcacggtttgggtttgcgtcgaggattcgtgatgtcgtattatgttggatttttagaacggtgttggtttgggggggttatgttcgttttggaatgattcgttggttaagaataatgtttgtggattggacgataaatgtgatttatcgagtgaactgaatattcaaattacatgttattgttagggaaaaaaaaaaaaaa

SEQ ID NO: 99 - protein, 325 aa, Linum perenne
MKPYHRVFLTPNPDGTLTRPNSTEPRTDPSIDPTQPVLSKDIQINESKQTFLRLFLPNQISDSDPKSKLPLLIYFHGGGFIICSPSSTFFHDYCSNAAVQLPAVVASVGYRLAPEHRLPAAFDDGLEAIRWIASRGCEEDPWLRDYVDFGNCFLMGISAGGNLAYHVGLHAAAEFGDPGHVPRMKIRGLILHHPFFGGVDRTESEKALINDTVLPLDLADLCWELCLPAGADRDHEYSNPTAGGASVSMEKIRTVGWKVAVIGYEGDPLVDKQKEVANVLEEKGVDVARYFASGGSHGLEVSDVEKGKEFNDGVLKEFVMSCLVT

SEQ ID NO: 100 - DNA, 1141 bp, Lamium amplexicaule
atctttttcttcactcaaaactcaacttccttcgttgactctaagcaatgtcctctaacgacgccacaccaatctccgatctatatactcgcttggggttcaacagaacccccaatggctccatcacacgtgtaccggatctttatcccacttcgccccccgatgatactctaactccggtcctcaccaaggacattcccgtcaattcagaccatcaaacctgggcacgcgtatacctaccggcggcggccaccgccaaacttccccttatagtctacttccacggcggaggcttcgtcgtatgcagcgccgcctcatccatgttccagaagttctgccgcgacgtcgccgatcagatcccggcggtgatggtgtcggtggagtaccgcaacgcgccggagcaccgcctccccgccgcctatgacgactgcgtggaagcgctgcactggatcagaaccaccgacgacgagtggatcgttaactacgccgatctgtcgaattgctttctaatggggatgagcgcgggaggaaatatcgcctacaacgcgggcctacgcgcggcagtagatcagatgaagcctctggagatcagagggctgatattgcaggcccctttcttcagtggggtccagaggaccccatccgagatgaagtcggtcaacgatgcggtccttcctttgcagttgaacgatttaatgtgggacctagcgttgccggttggggtggaccgggaccacggttattcgaacccggttcgggcgccggaatgcgagctaatcgataaggtgagagagaaagggtggagagttttggtggccgtgtaccggggcgacccgttggtggatcggatacttgaatttgtgagaatgttgagagaaaagggcgtggatgtggtggaaaagattggcgatggaggctttcatggaattgaaataggggatgaatctgaggcgaatatattttacggtgttcttaaggattttctacttgggtgccctaattgatctgttttaagagaagtggattagtctttctttcatgtaatgtaatagtatcttgtgcactatagcagttaaactttaaccaaggaaataacaatagaaattatttatccaaaaaaaaaaaaaaaaaaaaaaaaaaa

SEQ ID NO: 101 - protein, 318 aa, Lamium amplexicaule
MSSNDATPISDLYTRLGFNRTPNGSITRVPDLYPTSPPDDTLTPVLTKDIPVNSDHQTWARVYLPAAATAKLPLIVYFHGGGFVVCSAASSMFQKFCRDVADQIPAVMVSVEYRNAPEHRLPAAYDDCVEALHWIRTTDDEWIVNYADLSNCFLMGMSAGGNIAYNAGLRAAVDQMKPLEIRGLILQAPFFSGVQRTPSEMKSVNDAVLPLQLNDLMWDLALPVGVDRDHGYSNPVRAPECELIDKVREKGWRVLVAVYRGDPLVDRILEFVRMLREKGVDVVEKIGDGGFHGIEIGDESEANIFYGVLKDFLLGCPN

SEQ ID NO: 102 - DNA, 1132 bp, Eschscholzia californica
aatctttcttctttatcaacaatggaagataaatcttcatcacttatatccaatattaatccatatgaagcactacaacttgtttacgacgcacaagccgattctctcacatgtaatcttcctgttccaactatcgaatcgtcgggcgatccgaattgtaaggatatacctctcaacattgagaaaaagacatgggttcgaatttttagacccacaaccatcaccacccccacaaccaccagtgttaccactgcaacaaccaccacaaataagcttccaatcataatctactttcatggtggtgggttcatcctgtttagtgcagcctcaggtatgttccatgatttctgcaaatccatggctacccaagtacaagctttagttgtctcagtagagtaccgcctagcacccgaaaagcgtcttccggcagcttatgatgatgcaacagatgccataaattgggttaggaatcaagccatggatcctgttaatggtgagccatggttgagagactatgctgatttctcaaagtgttttctaatgggttgtagtgctggtgctaatatttcatatcatgttggtttaaaagcattggaattggatttggaaccaataaagatttctggtttgatactgaaccaacccttttttggtggatcaaagaggacagaatcagagattagactgagggatgatcagattttgtctaacccagtgattgatttgatgtggaaattgagtttgccaattggggtagatcaagatcatgtatatagtaatccaatggctaataatggtgggggaaatgttaaagtgataaagaggatatttgtgaatggatttgatggagatccattgtttgatcgtcaagttgagtttgtgaagatgttggaagagaagggtttaaaggttgaagcttccatggaagaaggtgggtttcatgggatgactttccttgatcccaaacaaactgattttttctgcaaaaagttgaaggatttcattttcctctcacaagttgtttaatggagattgcaacaaaaaacaaatgttgtttaatggagagtggagcaagatcaaagggtaagtgttgattaatgtttttgtttgattaaaaaaaaaaaaaaaaaaa

SEQ ID NO: 103 - protein, 334 aa, Eschscholzia californica
MEDKSSSLISNINPYEALQLVYDAQADSLTCNLPVPTIESSGDPNCKDIPLNIEKKTWVRIFRPTTITTPTTTSVTTATTTTNKLPIIIYFHGGGFILFSAASGMFHDFCKSMATQVQALVVSVEYRLAPEKRLPAAYDDATDAINWVRNQAMDPVNGEPWLRDYADFSKCFLMGCSAGANISYHVGLKALELDLEPIKISGLILNQPFFGGSKRTESEIRLRDDQILSNPVIDLMWKLSLPIGVDQDHVYSNPMANNGGGNVKVIKRIFVNGFDGDPLFDRQVEFVKMLEEKGLKVEASMEEGGFHGMTFLDPKQTDFFCKKLKDFIFLSQVV

SEQ ID NO: 104 - DNA, 1322 bp, Eschscholzia californica
atctatcacaatcaatttttgtgtcaaacacattattagaaaatgcaggcattcagaacagatgatgaattgaaagaaaaaccaacaatatcgagttacgaacaacacccgaaagaaaaaaacagtgatggatccacgaaagcatcatccacatgtccttatgatattatgaaaatcgcctccaacccggatggcacgttaactcgactaagttgtctccctattgtcccacctacaggcgataatccaattcatggtgagtctgttgtcaccaaagacataactttaaataaagataagaaaacctgggttaggatttacagacccacaaagttaccttcaaatgatacagatgtggctagattacctatcatacttttctttcattctgggtcaatggtcatgtttagcgtggatactgtcttagataacgagccatgtgcacgttttgctagtgaattactcacgatcgttgtgtcagttgaatatcgtcttgcacccgaaaataaacttccagcagcatacgaagacggcgaagaagccatcacttggatcaagaaacaagcagatgaagcaaatggtgaacaatggctaaaagattatgcagatttttctagggtttatattatgggttctagcactggtgctacaattgcttattacactgcattacgtgcactaaatttggatacagaaccggttaagctatccggattaattctaaaccaaccctttttcactggaaccaaagaaacccagtcagaaacaaatttgataaatgattcagtacttccaagttcagtaattgatttaacagtggagttagcattacccgttggatcagatcgtgatcatgagtattttaatccaatggtgaatggagctgattatatgaatgtgaaaaaattacctaggtgtttggttagagggttcgaaggggacccattattagatcgtcagatggaatttgtgagaatgttgattacaaatggagttcaagtaacggctcattttagtgattatggttttcatttggttgattatattgatcctaagagacatttggctatgttgggatatatgaaagatttcatcatttgatattctttaccaaaatttcccgatggatttctactatcctcaaattgtgtgtatctacatgaagcaaaaattacttaaaatttgtaatttattgtctactttgtggttcgatttgttttttatttgtttgtacatagtatttcgattagtctataatccacaaatctttataaatatcaagatcttacttaccttttaaaaaaaaaaaaaaaaaaaaaaaa

SEQ ID NO: 105 - protein, 352 aa, Eschscholzia californica
MQAFRTDDELKEKPTISSYEQHPKEKNSDGSTKASSTCPYDIMKIASNPDGTLTRLSCLPIVPPTGDNPIHGESVVTKDITLNKDKKTWVRIYRPTKLPSNDTDVARLPIILFFHSGSMVMFSVDTVLDNEPCARFASELLTIVVSVEYRLAPENKLPAAYEDGEEAITWIKKQADEANGEQWLKDYADFSRVYIMGSSTGATIAYYTALRALNLDTEPVKLSGLILNQPFFTGTKETQSETNLINDSVLPSSVIDLTVELALPVGSDRDHEYFNPMVNGADYMNVKKLPRCLVRGFEGDPLLDRQMEFVRMLITNGVQVTAHFSDYGFHLVDYIDPKRHLAMLGYMKDFII

SEQ ID NO: 106 - DNA, 1345 bp, Amaranthus hypochondriacus
aaaatcaagctcttctaataattcatatacccatcttcaatcatataattggactcatcaaaaatggaaaatatagacccaaacaaaatcgcagaaagttttttcatgacccataacccagatggaacattcactcgtagacttgacatctacccaactgttcctccctccattactgacctatcttcaccatctctttccaaagatattcctcttaactctgagaaatccacctgggttcgaatcttcttacctcgtacttcatcatcttcatccgaaaaaaagaagcttccgatactgatctatgttcatggaagtgggtttgttgtcgcaagtgcggcccaccccaacttccatgatttctgctcgtacgcgggaagtgaactgcccgtgttagttgtctcggtcgagtaccgtctcgctccagaacatcgtcttcctgcagcgtacgacgatgttctggaggctttaaattgggtaaaagaaggaaaagaaaaatgggtagaagagtatggtgatttatctagatgtgttatgatgggggatagtgcgggtggaaatattgtttatcaagttggattgatggtggccgaacgagatgaggattttaagccgttgattattacaggattgggtttgatccaaccgttttttagcgggttagatcggactgaatccgagattcggttagaaaccgatccgactttgccgcttgctattaatgatctgtgttgggatattgctttgccggttggatcaaaccgaagtcatgagtattgtgatccgttgaaggatggcggttcgaggttgttggatcgggttcgtgatttggggtggcaggttcgggttgtgagtaatgatggtgacccactttatgatcggagtgtggagttggtgaaattgttggaaaagagaggggtgaatgttaagtctatgtttgttgaaggtggtaaacatgggatgtttgtgggtgatccttctaagtttaagtcaaaggagttgttgacttttgttgaagatttgtttaatgattagttaatttgctcggagaaagttttaagtgtacttagtgtacgctaaaataaaatgcagtaacttgaatatgatagtatgctggtggagtaaagatagtaaaaagtgtaagttagtagagcagagaataaaaaatgtgtagagcgagcattggtgcagaataaattagagttcactaatttacgccaaactttgtcttttggtttattgttatggactagtaatgaatgtaataaatatagtttcaatgtttttttagaacattttaagattttaataaaagtatgttttgttcttataaaaaaaaaaaaaa

SEQ ID NO: 107 - protein, 323 aa, Amaranthus hypochondriacus
MENIDPNKIAESFFMTHNPDGTFTRRLDIYPTVPPSITDLSSPSLSKDIPLNSEKSTWVRIFLPRTSSSSSEKKKLPILIYVHGSGFVVASAAHPNFHDFCSYAGSELPVLVVSVEYRLAPEHRLPAAYDDVLEALNWVKEGKEKWVEEYGDLSRCVMMGDSAGGNIVYQVGLMVAERDEDFKPLIITGLGLIQPFFSGLDRTESEIRLETDPTLPLAINDLCWDIALPVGSNRSHEYCDPLKDGGSRLLDRVRDLGWQVRVVSNDGDPLYDRSVELVKLLEKRGVNVKSMFVEGGKHGMFVGDPSKFKSKELLTFVEDLFND

SEQ ID NO: 108 - DNA, 1113 bp, Sesbania bispinosa
aaaacgaaactccaccatagatccatacaaaattctcaaaatcaaactcaaccccgatggttccctaacaagaaaccccatcgttcccaccgtaccaccatcttccgatcccaccaactcgcctccgcaaccatctctctctaaagacattaccttaaacgccgccacaaaaacctccatccgtctcttcatcccccaccctccgccacctgcaaaactccctctcattctctacttccacggcggcggtttcatcctctaccactcttcctcactgatcttccaccactcatgttccgaattttctgctcaaatacctgccgttatcgcatccgtcgattaccgtctctcgccggagcatcgtcttcccgcagcctacgacgacgccgtcgattcccttctctggctcaaatgccaagcgcaaaatccaaatgaatctgatccgtggattagaaaccacgtggacttcgataagtgcttcttgatgggaaacagtgcaggagctaacattgcctactttgcaggtctacgtgcactcgacctcgatctctctccgattaagatccgagggctgatattaaactctatatttttcagtggggtcgagagaacggaatctgagcttcgtttagttaacgatcgtatattgccattacctgtgggtgatctcatgtggcgcctatgtttgccggagggtgcagatcgcgaccacgtgtactgcaatccgacggttgcggatagcgtatatggtgagaagatcggacggctgccgaggtgttttgttaatggatatagtggagatccgttggtggataagcaaaaggagttggtgaggatattgaaggcacgtagggtgcacgtggtgtcgtggttttgtgagggtgggtatcatgccgtggaaatctttgatcgttctaaagcgcgggatttggttgatagtgttaagaaatttgtagctactcgtcaatcctctttgtgactttttggtcaaggatgtgtgtgactgtgtgccttttaatcttgtaagataatattgaacagttagtgattaaattatgagcattatatattattgcaaaaaaaaaaaagaaaaaaaaaaaaaaaaaaaaaaaa

SEQ ID NO: 109 - protein, 325 aa, Sesbania bispinosa
KRNSTIDPYKILKIKLNPDGSLTRNPIVPTVPPSSDPTNSPPQPSLSKDITLNAATKTSIRLFIPHPPPPAKLPLILYFHGGGFILYHSSSLIFHHSCSEFSAQIPAVIASVDYRLSPEHRLPAAYDDAVDSLLWLKCQAQNPNESDPWIRNHVDFDKCFLMGNSAGANIAYFAGLRALDLDLSPIKIRGLILNSIFFSGVERTESELRLVNDRILPLPVGDLMWRLCLPEGADRDHVYCNPTVADSVYGEKIGRLPRCFVNGYSGDPLVDKQKELVRILKARRVHVVSWFCEGGYHAVEIFDRSKARDLVDSVKKFVATRQSSL

SEQ ID NO: 110 - DNA, 1207 bp, Artemisia tridentata
gagaagacattgtgtggttacacacacatattactccattctaaagcaagaatgacttctccagctcaaccaaccaagttcctcaatatcaccttaaactccgatggatcactgacgcgacccaccacctttccagtaacacagttaaatcctcaactcaccaccgattcccaactcagtctccataaagacatcccactaaacgccactacaggcactttccttcgtctctatcgccccgtaacgccacctgcaaaaaaattaccaatcatcatctactttcacggtggcggtttcattttaatcagtgccaccactactttcatacaccttacatgtactgaaatttccgctcattctccagccattatcgtatcccttgaataccgtcttgccccagaacaccgtctccctgcagcgtatgatgatggactggatgcaatattatgggtgcgtgaccaggcgctgagatcagaagttgacggttgtgacgagtggttgagcgagtttgctgacttttctaaactctacttaatgggaactagtgctggaggaaatttaacctacaatgcaggtttacgtgcacttgatgttgatcttgatccgatcaagatcatagggcttataatagaccaacctttctttggtggggtcgagcgtactgaagctgaactaaagctagttaatgactatgttctccctttggcagcaacggatcttatgtggtctctggcattgcctgtaggctctgatagaaaccacgagtactgcaatccgttgtttgagcgagatggattctcaaatgattatattaaaagacttcctacttgtttgatcagagtaaatggtgaagatccagtcgtcgatagacaaaaggattttgctaatatgttggaggcacgtggtgtgcacatgattagaaagttctacgagaaagggtgtcacggtgcagagatctttgatgctaaaaaggctgagatgttatatggcgatgttaagaatttcattcggcttagctgacaaaagataagtgtaacagctataatatacattaagctgttggaaagtttaatcatttagaaatcgatcagaaatgttttacatcatttatctatgtattatttcattatcatgtacttattgggcttgactttgagattgcacgatatagatatgcagagtattattcgaaaaaaaaaaaaaaaaa

SEQ ID NO: 111 - protein, 322 aa, Artemisia tridentata
MTSPAQPTKFLNITLNSDGSLTRPTTFPVTQLNPQLTTDSQLSLHKDIPLNATTGTFLRLYRPVTPPAKKLPIIIYFHGGGFILISATTTFIHLTCTEISAHSPAIIVSLEYRLAPEHRLPAAYDDGLDAILWVRDQALRSEVDGCDEWLSEFADFSKLYLMGTSAGGNLTYNAGLRALDVDLDPIKIIGLIIDQPFFGGVERTEAELKLVNDYVLPLAATDLMWSLALPVGSDRNHEYCNPLFERDGFSNDYIKRLPTCLIRVNGEDPVVDRQKDFANMLEARGVHMIRKFYEKGCHGAEIFDAKKAEMLYGDVKNFIRLS

SEQ ID NO: 112 - DNA, 1142 bp, Artemisia tridentata
gaactatatgtatcaattagaagacattgtgtggttacacacacatattactccattctaaagcaagaatgacttctccagctcaagcaaccaagttcctcaatatcaccttaaactccgatggatcactgacgcgacccaccacctttccagtaacacagttaaatcctcaactcaccaccgattcccaactcagtctccataaagacatcccactaaacgccactacaggcactttccttcgtctctatcgccccgtaacgccacctgcaaaaaaattaccaatcatcatctactttcacggtggcggtttcattttagtcagtgccaccactactttcatacaccttacatgtactgaaatttccgctcattctccagccattatcgtatcccttgaataccgtcttgccccagaacaccgtctccctgcagcgtatgatgatggactggacgcaatactatgggtgcgtgaccaggcgttgggatcagaagttgacggttgtgacgagtggttgagcgagtttgctgacttttctaaagtctacttaatgggaactagtgctggaggaaatttaacctacaatgcaggtttacgtgcacttgatgttgatcttgatccgatcaagatcatagggcttatagtagaccaacctttctttggtggggtcgagcgtactgaagctgaactaaagctagttaatgactatgttctccctttggcagcaacggatcttatgtggtctctggcattgcctgtaggctctgatagaaaccacgagtactgcaatccgttgtttgagcgagatagattctcaaatgattatattaaaagacttcctacttgtttgatcagagtaaatggtgaagatccagtcgtcgatagacaaaaggattttgctaatatgttggaggcacgtggtgtgcacgtgataagaaagttctacgagaaagggtgtcacggtgcagagatctttgatgctaaaaaggctgagatgttatatgacgatgttaagaatttcatttggcttagctgacaaaagataagtgtaacagctataatatacattaagctgttggaaagtttaatcatttagaaatcgatcagaaatgttttacatctaaaaaaaaaaaaaaaaaaa

SEQ ID NO: 113 - protein, 322 aa, Artemisia tridentata
MTSPAQATKFLNITLNSDGSLTRPTTFPVTQLNPQLTTDSQLSLHKDIPLNATTGTFLRLYRPVTPPAKKLPIIIYFHGGGFILVSATTTFIHLTCTEISAHSPAIIVSLEYRLAPEHRLPAAYDDGLDAILWVRDQALGSEVDGCDEWLSEFADFSKVYLMGTSAGGNLTYNAGLRALDVDLDPIKIIGLIVDQPFFGGVERTEAELKLVNDYVLPLAATDLMWSLALPVGSDRNHEYCNPLFERDRFSNDYIKRLPTCLIRVNGEDPVVDRQKDFANMLEARGVHVIRKFYEKGCHGAEIFDAKKAEMLYDDVKNFIWLS

SEQ ID NO: 114 - DNA, 987 bp, Carica papaya
atgtcagatcaaactcatccatcccctcccatcgttgacccataccagtacctccagatcatcccaaacccagatggtaccatcacccgcaacttcaactccttcccaaagatcccttccgcaccggattttacccacaccgcccctgttctaaccaaggatattcccatcagcccttcaaacaacacctggttccgtctttacctccccaccaccgccctgacttccttctcctccgacaacaaactccctcttattgtctacttccacggcggaggttttgtcctctgcagcgcagagcattccatcttcgatgatttctgtgccaacctggccactgatctccatttaatcgttgcatccgtcgagtaccgtctggcgccggaacaccgcctcccggcagcctacgatgacgccatggaatctctgcactgtatcaaaacaatcgaagatgattggttaaagaggtatgcggatttttccaagtgtttcattatgggtattagtgcaggtggtaacatagcgtaccaagtaggactacgagctgccgacgcggtcgatgatgtcagtcctataaaaatcagagggctgatattgcagcaaccattcttcggtggggtggagagaacaggatcagagcttagattgatgaacgacccgaggttgccgccgatcgtttgcgatttgatgtgggatctgtcgttgcccgttggcgttgaccgtgatcatgagtatagcaatccaagagcatcaacggggttagagaatgtgaagaagctggggtggagggtgctggtgacgggatgcgatggggaccctcttatcgacagacagattgagttggtgaagataatgaaggaaagaggtgttgaagcagttggccattttagcgtgggagattatcatggagtggaggtgatggaacccagcaaagctaagaaatcgcatgcggtaataaaagatttcttgtcttcagcttccatttaa

SEQ ID NO: 115 - protein, 328 aa, Carica papaya
MSDQTHPSPPIVDPYQYLQIIPNPDGTITRNFNSFPKIPSAPDFTHTAPVLTKDIPISPSNNTWFRLYLPTTALTSFSSDNKLPLIVYFHGGGFVLCSAEHSIFDDFCANLATDLHLIVASVEYRLAPEHRLPAAYDDAMESLHCIKTIEDDWLKRYADFSKCFIMGISAGGNIAYQVGLRAADAVDDVSPIKIRGLILQQPFFGGVERTGSELRLMNDPRLPPIVCDLMWDLSLPVGVDRDHEYSNPRASTGLENVKKLGWRVLVTGCDGDPLIDRQIELVKIMKERGVEAVGHFSVGDYHGVEVMEPSKAKKSHAVIKDFLSSASI

SEQ ID NO: 116 - DNA, 981 bp, Eutrema salsugineum
atgtccaatccatctccagtcactgatccttacgcttatctcaacatcgtcaagaatccagatggctccatcactcgcgacctcaccaacttcccatgcgcctcagccacacctgatccttccccactaaaccccgtcgtatccaaagacatccccgtgaaccagtcaaagtcaacatggattcgtctctaccttccaaccaccgccctcgacggcggcgctccgtctcaaaaactccctctcgtggtgtactaccacggcggcggattcatcctctgcagcgtcgacttgcagctcttccatgacttctgctccaacatggcgcgagatctcaacgcgatcgtcgcatccccttcctaccggctagctcccgagcaccgactcccggcggcatacgacgacggtgcggaggcgctagagtggatcaaaaactccggcgaggattggatcagatctcacgccgatttctctaatgtgttcctcatgggtacgagcgccggagggaacttggcttacaacgtcgggttaagatccgccgaatccgtcgcggatctgagtccgttacagatccgtggattgattctacaccatccgttcttcggcggagaagagcggtgcggatctgagattagacttgtgaacgatcaggtttgtccgcctatagtcaccgacgttttctgggatctttgtctccccgtcggcgttgatcgggatcatgagtattcgaatccgacggtgggagatggatcggaggagttggagaaaatcggacggttgagatggaaggtgatggtgataggaggagagagagatccgatggtagatcggcagagagatgtggcgaagttaatgaagaagaagggagtggaagtggtggagctttttaccgacggcgacgtccacggtgctgagatcggagatccttccaagcgtcatgctctgtttagttccatcggaaatttcatttccacctctctgtaa

SEQ ID NO: 117 - protein, 326 aa, Eutrema salsugineum
MSNPSPVTDPYAYLNIVKNPDGSITRDLTNFPCASATPDPSPLNPVVSKDIPVNQSKSTWIRLYLPTTALDGGAPSQKLPLVVYYHGGGFILCSVDLQLFHDFCSNMARDLNAIVASPSYRLAPEHRLPAAYDDGAEALEWIKNSGEDWIRSHADFSNVFLMGTSAGGNLAYNVGLRSAESVADLSPLQIRGLILHHPFFGGEERCGSEIRLVNDQVCPPIVTDVFWDLCLPVGVDRDHEYSNPTVGDGSEELEKIGRLRWKVMVIGGERDPMVDRQRDVAKLMKKKGVEVVELFTDGDVHGAEIGDPSKRHALFSSIGNFISTSL

SEQ ID NO: 118 - DNA, 972 bp, Artificial Sequence
  contig of ESTs from B.napus and B.oleracea
atgtccgaaccaactccaatctctgatccttacgcttatctcaacatcgtaaagaaccctgatggctccatcacccgcgacctcactaacttctcgtgcaccccagccacacctgatccctccccacaaacccccgtcgtatccaaagacgtctccatcaacaagtcaaaatccacgtggatgcgtctctacgcgccctcctccaccctaaacgacaccgttccctctcaaaaactccctctcatcgtctactaccacggcggaggattcgtcctatgcagcgtcgacctccaagtcttccacggcttctgctccgacatggcgcgtgacctcaacgcggtcgtcgcgtcgccttcctaccgtctcgctcccgagcacaggctcccggcggcgtacgacgacggcgcggaggcgctggagtggatcagaaactccgacgaggagtggatcaagtctcgcgccgatctctccaacgtcttcctcatggggactagcgccggcgggaacttggcttacaacgtcgggatgagatccgctgccgcatcggatctgagtccgttacagatccgtgggatgattctgcaccatccgttcttcggcggcgaggagagaagcggatctgagatgaggcttgcgaacgatcaggtttgtccgccgatcgtctccgacgtgttctggcatctgagtcttcccgttggtgttgatcgggatcacgagtattcgaatccgacggtgggagatggtttggagaagatcggagggttgagatggagggtgatggtggttggaggggaggaggatccgatggtggatcggcagagggacgtggcgaagctgatgaagaggaagggagtggaggttgtggagatgtttaacgacggcgatgttcacggtgcggagattggagatccgtctaagcgtaaacctttatttgcttccatcgggaaattcatttcctcttctgctgcactc

SEQ ID NO: 119 - protein, 324 aa, Artificial Sequence
  contig of ESTs from B.napus and B.oleracea
MSEPTPISDPYAYLNIVKNPDGSITRDLTNFSCTPATPDPSPQTPVVSKDVSINKSKSTWMRLYAPSSTLNDTVPSQKLPLIVYYHGGGFVLCSVDLQVFHGFCSDMARDLNAVVASPSYRLAPEHRLPAAYDDGAEALEWIRNSDEEWIKSRADLSNVFLMGTSAGGNLAYNVGMRSAAASDLSPLQIRGMILHHPFFGGEERSGSEMRLANDQVCPPIVSDVFWHLSLPVGVDRDHEYSNPTVGDGLEKIGGLRWRVMVVGGEEDPMVDRQRDVAKLMKRKGVEVVEMFNDGDVHGAEIGDPSKRKPLFASIGKFISSSAAL

SEQ ID NO: 120 - DNA, 978 bp, Artificial Sequence
  contig of ESTs from B.napus and B.oleracea
atgtccgaaccatctccagtctctgatccttacgctcatatgggcatcgtaaagaacccagatggctccctcactcgcgaccccaccagattcccgcgcgtcccagccacacctgacccctccccggtaaacrccgtcgtatccaaagacatcaccgtgaaccactcaaactccacgtggatgcgtctctacgtccccgttaccgcactaaacgacagcgtttcgtctaaaaaactccctctcgtcgtctactaccacggcggaggattcgtcatctgcagcgtcgacttcaaactcttccacgacttctgcaaccgtatggcgcgtgatctcaacgcggtcgtcgcgtcgccttcgtaccggctggctcccgagcacagactcccggcggcgtacgacgacggagttgacgcgcttgagtggataagaaactccgacgacgagtggatcaagtctcacgctgatctctccaacgtgttcctcatggggacaagcgctggtggtaacctggcatacaacgtcgggcttacatccgccttggcggatctgagtccgttacgtatatgtggactggtcttacaccatccgttcttcggcggcgaggagcggtgcgagtccgagatcagacttgagaacgatcaggtttttccgcctactgccggagacgtttgctgggagctttgtctccctgtcggagctaaccgggatcacgagtattctaatctgacggtgggagatggaccggtgaatatggagatgatcggacggttgggatggaaggtgatggtgagtggaggaggaggcgatccgatgatagataggcagagagatgtggcgaagttgatgaaggagaagggagttgatgtggtggagcgttttaccgacggcgatgttcacggtgctgagctcggtgatccgaccaagagtgaaactctgtttgcttccatcagaaatctcattgactcttctgcaccgtaa

SEQ ID NO: 121 - protein, 325 aa, Artificial Sequence
  contig of ESTs from B.napus and B.oleracea
  misc_feature (45)..(45): Xaa can be any naturally occurring amino acid
MSEPSPVSDPYAHMGIVKNPDGSLTRDPTRFPRVPATPDPSPVNXVVSKDITVNHSNSTWMRLYVPVTALNDSVSSKKLPLVVYYHGGGFVICSVDFKLFHDFCNRMARDLNAVVASPSYRLAPEHRLPAAYDDGVDALEWIRNSDDEWIKSHADLSNVFLMGTSAGGNLAYNVGLTSALADLSPLRICGLVLHHPFFGGEERCESEIRLENDQVFPPTAGDVCWELCLPVGANRDHEYSNLTVGDGPVNMEMIGRLGWKVMVSGGGGDPMIDRQRDVAKLMKEKGVDVVERFTDGDVHGAELGDPTKSETLFASIRNLIDSSAP

SEQ ID NO: 122 - DNA, 969 bp, Brassica napus
atgtccgaaccatctccagtctctgatccttacgctcacataggcatcgtaaagaacccagatggctccatcactcgcgaccccaccagattcccgtacgcctcagccacacctgacccctccccggtaaacaccgtcgtatccaaagacatcaccgtgagccactcaaactccacgtggatgcgtctctacgtccccgttaccgcactaaacgacggcgtttcgtctaaaaaactccctctcgtcgtctactaccacggcggaggcttcgtcatctgcagcgtcgacttcaaacccttccacgacttctgcaaccgtatggcgcgtgagctcaacgcggtcgtcgcgtcgccttcctaccggctggctccggagcacagactcccggcggcgtacgacgacggagtggacgctctgaggtttattagaacctcagacgacgagtggatcaagtctcacgctgatctctccaacgtgttcctcatggggacaagcgctggtggtaacttggcctacaacgtcgggctcagatccgccttggcggacctgagtcccgtacgtatccgtggactggtcttacaccatccgttcttcggcggcgaggagcggtgcgagtccgagatcagacttgagcacgatcaggtttttccgcctactgccggagacgtttgctgggagctttgtctccctgtcggagctaaccgggatcacgagtattctaatctgacggtgggagatggaccggtgaatatggagatgatcggacggttgggatggaaggtggtggtgagtggaggaggaggagatccgatgatagataggcagagagatgtggcgaagctgatgaaggagaagggagttgatgtggtggagcgttttactgacggcgttgttcacggtgctgagctcggtgatccgaccaagagtacaactctgtttgcttccatcagaaatctcatttactcttag

SEQ ID NO: 123 - protein, 322 aa, Brassica napus
MSEPSPVSDPYAHIGIVKNPDGSITRDPTRFPYASATPDPSPVNTVVSKDITVSHSNSTWMRLYVPVTALNDGVSSKKLPLVVYYHGGGFVICSVDFKPFHDFCNRMARELNAVVASPSYRLAPEHRLPAAYDDGVDALRFIRTSDDEWIKSHADLSNVFLMGTSAGGNLAYNVGLRSALADLSPVRIRGLVLHHPFFGGEERCESEIRLEHDQVFPPTAGDVCWELCLPVGANRDHEYSNLTVGDGPVNMEMIGRLGWKVVVSGGGGDPMIDRQRDVAKLMKEKGVDVVERFTDGVVHGAELGDPTKSTTLFASIRNLIYS

SEQ ID NO: 124 - DNA, 924 bp, Artificial Sequence
  assembled contig from Citrus sinensis and Citrus clementina
atgttcaccttcaactccgacggcacgatgactcgcaaccacagcctctacccaaacaccgcagccacacccgatccaaatgacgacaccatagctctctccaaagatgtccccgtcaaccaatcaaacaacacttgggtccgcatattcctgccccgtcaagcacttgattcttccaccgacaccaagtttcccctcgtagtttacacccacggtggaggcctccttctcttaagcgcagccacaaaaatctaccatgatttatgctcagaaattgtagcccgagtccctgccattattgtgtcagtagattacaggcttgcccccgagcaccgcctcccagcggcctatgatgatgccgtggaagtcttgcaatgggtcaaaaccactcaagaacactggttgcgacaatacgctgacttctcgtcttgtttcataatgggtgatagcggaggtggcaacatcgcttaccacgcagcactgcaagcagcggcacaagttgatgatttgttacctttgaagatcaaagggctgatattgctcaagcctttcttcggtggggtcaaaaggactgagtcagagttgaggttggccaatcaaccgattttaccaccacctcaaactgatttcacgtggcagttagcattacccatcggagctgaccgcgatcatgagtattccaatccaattgtgggaggtgggtcaaagtttttagaccaattcaggttgttagggtggaaggtgatggtgactgggggcagtgaggatacgttgtttgaccgtcaagttgaactggcgaagttgatggagcagaagggtgtgaatgtggtgagttattttgatgatagcccccacgatatgattggcgatcctgtcaagcttgaggctctgtatgttaacataaaaaaattcattttgtcttga

SEQ ID NO: 125 - protein, 325 aa, Artificial Sequence
  assembled contig from Citrus sinensis and Citrus clementina ESTs
MSDTTALCESTTDFPQHPMFTFNSDGTMTRNHSLYPNTAATPDPNDDTIALSKDVPVNQSNNTWVRIFLPRQALDSSTDTKFPLVVYTHGGGLLLLSAATKIYHDLCSEIVARVPAIIVSVDYRLAPEHRLPAAYDDAVEVLQWVKTTQEHWLRQYADFSSCFIMGDSGGGNIAYHAALQAAAQVDDLLPLKIKGLILLKPFFGGVKRTESELRLANQPILPPPQTDFTWQLALPIGADRDHEYSNPIVGGGSKFLDQFRLLGWKVMVTGGSEDTLFDRQVELAKLMEQKGVNVVSYFDDSPHDMIGDPVKLEALYVNIKKFILS

SEQ ID NO: 126 - protein, 314 aa, Raphanus sativus
MSMVKNPDGSITRDPTRFTGVPATPDPPSPQIPVASKDITVNHSISTWMRLYVPTAALNDDVPSKKLPLIVYYHGGGFVICSVDLKHFHDFCNLMARELNAVVASPSYRLAPEHRLPAAYDDGRDALEFIRTSDDEWIKSHADLDNVFLMGTSAGGNLAYNVGLRSAFAADLSPLRIRGLILHHPFFGGEERCESEITLKNDQVFPPNVGDICWELCLPVGANRDHEYSNPTVGDGPVNMEVIGRLGWKVMVSGGIRDPMIDRQRDVAKLMKEKGVDVVERFTDGDVHGAELGDPTKSETLFASIRNLIYSSVP

SEQ ID NO: 127 - protein, 327 aa, Arabidopsis lyrata
MAEATTPISDPYAFLNIVKNPDGSITRDLTNFPCAAATPDPTPENPAVSKDLPVNQSKSTWLRLYLPSSAVNDGVSSQKLPLVVYYHGGGFILCSVDMQPFHDFCSEMARDLNAIVVSPSYRLAPEHRLPAAYDDGMEALEWIKTSDDEWIKSHADFSKVFLMGTSAGGNLAYNVGLRSADSVSDLNPLQIRGLILHHPFFGGEERCGSEIRLVNDQVCPPIVTDVMWDLSLPVGVDRDHEYSNPTVGDGSEDLEKFGRLRWKVMMIGGEDDPMIDRQRDVAKLMKKRGVELVEHYTVGHVHGAEIGEPSKRKTLFLSIKNFISSLL

SEQ ID NO: 128 - protein, 311 aa, Olimarabidopsis pumila
PYAYLNIVKNPDGSITRLTNFPGAAASTDPSPLNLVVSKDLPVNQSKSTWLRLYVPSSAVNDGVPSQKLPLVVYYHGGGFIMCSVDMQPFHDFCSEMARHLNAIVVSPSYRLAPENRLPAAYDDGVEALEWINNSDEEWIKSHADFSNVFLMGTSAGGNLAYNVGIRSADSVSDLSPLQIRGLILHHPFFGGEERCGSEIRLANDQVCPPIVTDVFWDLSLPVGVNRDHEYSNPMVGDGSENMEKIGRLRWKVMMIGGELDPMVDRQRDMGKLMKKKGVEVVEHFNGGDIHGAEIGDPSKRKPLFVSIENF

SEQ ID NO: 129 - protein, 329 aa, Capsella rubella
MCEQSPAPVSDPYAYLQIVKNPDDSITRDLTNFPCAAATPDPSPQNPAVSKDLPVNQSKSTWLRLYVPSSALNDGVSSQKLPVVVYYHGGGFIMCSVDFQVFHDFCSEMARDLNAIVVSPSYRLAPEHRLPAAYDDGTEALEWIKNSDDEWIKSHADLSNVFLMGTSAGGNLAYNVGLRSAADSVSDLSPLQIRGLILHHPFFGGKERCGSEIRLANDQVCPPIVTDVMWELCLPVGVDRDHEYSDPTVGDGHENLEKIGRLGWKVMVIGGELDPMVDRQRYVAKLMKKKGVDVVEQFTSGDVHGAEVMDPSKRKTLFVSIGSFISSSR

SEQ ID NO: 130 - protein, 328 aa, Capsella rubella
MSEQKTPSADPYAYLNMVRNPDGSVTRLLNNLPCAAATPDPSPQNPAVSKDVPVNQSKSTWLRLYVPSSAVIDGVSSKKLPVVVYYHGGGFVICSVDLQLFHDFCSEMARELNAVVVSPSYRLAPEHRLPAAYEDGTEALEWIKNSDDEWIKSYADLSNVYLMGTSAGGNLAYNVGLRSVDSVSELSPLQIRGFILHHSFFGAKERCESEIKLANDQVCPPAVTDVMWDLCLPIGVDRDHEYSNPTVGDGSENLEKFGRLGWKVMSIGGELDPMIDRQRDVAKLMRKKGVDVAEQYIDGAVHGAEIKDASKRKNMFVSIASFISSSAQ

SEQ ID NO: 131 - protein, 328 aa, Brassica rapa
MSEPTPISDPYAYLNIVKNPDGSITRDLTKFPCTPATPDPSPQTPVVSKDISINKSKSTWMRLYAPSSTLNDAVPSQKLPLVVYYHGGGFVLCSVDLQVFHGFCSDMARDLNAIVASPSYRLAPEHRLPAAYDDGAEALEWIRNSDEEWIKSRADLSNVFLMGTSAGGNLAYNVGMRSSAAASDLSPLRIRGMILHHPFFGGEERSGSEIRLANDQVCPPIVSDVFWDLSLPVGVDRDHEYSNPTVGEGSGGLEKIGGLRWKVMVVGGEEDPMVDRQRDVAKLMKRKGVEVVEVFNDGDVHGAEIGDPSKRKPLFASIGKFISSFAAL

SEQ ID NO: 132 - protein, 322 aa, Brassica rapa
MSEPSPVSDPYAHIGIVKNPDGSITRDPTRFPYASATPDPSPVNTVVSKDITVSHSNSTWMRLYVPVTALNDGVSSKKLPLVVYYHGGGFVICSVDFKPFHDFCNRMARELNAVVASPSYRLAPEHRLPAAYDDGVDALRFIRTSDDEWIKSHADLSNVFLMGTSAGGNLAYNVGLRSALADLSPLCIRGMILHHPFFGGEERCESEIRLENDHVFPPSAGDVCWELCLPVGANRDHEYSNLTVGDGPVNMEMIGRLGWKVVVSGGGGDPMIDRQRDVAKLMKEKGVDVVERFTDGVVHGAELGDPTKSTTLFASIRNLIYS

SEQ ID NO: 133 - protein, 330 aa, Prunus persica
MSGAGEGEAEDISTVDNYQRLQIAPNPDGTITRLAKFPESPPTSDPKLPTPVLSKDIPINESKNTWVRIYLPRHALDHSSSSKLPLVVFYHGGGFILFSAASTIFHDYCVGFATDVPVIIASVEYRLAPEHRLPAAYEDATEALHWIKTTPDDWLRDHADLSNTFLMGISAGGNIAYHAALHADVDRLHPLKIHGLILQQPFFSGTQRSGSELRLANNPAFPLSCSDLMWDLSLPIGASRDHEYCNPTVGDGCKKLDRMAVGWRVLVTGWDGDPLIDRQIEVAKMLEENGVHVVCHFAEGGYHGVDIIDASKAEALFVVVKNFIFSQSAS

SEQ ID NO: 134 - protein, 295 aa, Vitis vinifera
MSETPKPSVSYNDSLKMVHNPDGSVTRLTLFPITSASPNPDQYTTHTSPFLSKDITINTQKNIWVRVFLPRQALENNATTSKLPLIVYFHGGGFITCSANTSVFHDLCAGMATDLSAVVVSLEYRLAPEYRLPAAYDDAEEALHWIKSTDEPWVMKYADTSCCFLMGSSAGGNMAYFAGVRVAGAVEEFKPLRIKGLIMHHPFFGGMKRSGSEVRSENDTILSLSATDLMWELALPEGADRDHEYSNPMVEKGAEQCEKIGRLGWKVLVTGCEGDLLLDRQKEWVEMAKKKGVAI

SEQ ID NO: 135 - protein, 326 aa, Vitis vinifera
MPEHPAVPNFNDYLKMVNNPDGSVTRPVTLPSTAPSPDHTTDIPVLSKDITINPDKNIWVRVFLPREARDSTPPAAGAARKLPLIVYFHGGGFVICSAATTIFHDLCALMAAEIGAVVVSVEYRLAPEHRLPAAYEDGVEALKWIKSSGEAWVSEYADVSRCFLMGSSAGGNLAYFAGIHMADSVADLEPLKIRGLILHHPFFGGIHRSGSEVRLENDGVMPLCSTDLMWELALPEGVDRDHEYSNPMAKNASEHCSKIGRVGWKFLVAGCEGDLLHDRQVEFVDMLKGNGIEVEAVFVRGDCHVIELYDSSKAKALFGRVKNFMA

SEQ ID NO: 136 - DNA, 978 bp, Vitis vinifera
atggacgcttataactccatcggcctcgtccctaacccagatggctctttcactcgccgtagctcacatctctccctagctgctactgatgaaaccgccgcctccgactccgccgtggctttttccaaagatgtgcctctcaaccccgccaacaacacctttctccgcctcttccggcctcgtcttcttcctccaaacaccaagcttccagtcatcttgtactttcatggaggtgggttcgttgtcgccagcgtctctactccgcctttccatgaaacttgcaactccatggcagctaagcttccagctctggtcctgtccctcgagtaccgtctcgcgccggagcaccgtctcccggctgcctacgaagacgccgccgaagccatcatgtgggtccggagccaggcggctgcggagatcgacggcggtgagccgtggttgagagagtacgctgatttttccaagtgctttttgatggggggcagtgcaggagcaaacatggtgttccacgcaggtctacgtgcacttgatgctgatcttggggcgatgaagatccaagggctggtactgaatcagccctacttcggtggggtggagaggaccgaatcggaactgagactggcggagggtcggaacttgccgttgccggccaacgatctgttatgggcacttgcattgcccgacggcgctgatcgtgatcatgagtacagtaatccactggcgggagggtcctaccaggagaagatcggacggctacagaagtgtctggtgatagggtacggtggagatccactggttgacagacagaggagggttgtggagatgatggaggcgcgtggggtgcacgtggtggcgaaattcaaagatggcggccaccatggcatagagtgctctgatccctcacacgctgaagccatggatgatgatgtcaaggatttcattgactccacgctccatgattttgacccaaagcattaa

SEQ ID NO: 137 - protein, 325 aa, Vitis vinifera
MDAYNSIGLVPNPDGSFTRRSSHLSLAATDETAASDSAVAFSKDVPLNPANNTFLRLFRPRLLPPNTKLPVILYFHGGGFVVASVSTPPFHETCNSMAAKLPALVLSLEYRLAPEHRLPAAYEDAAEAIMWVRSQAAAEIDGGEPWLREYADFSKCFLMGGSAGANMVFHAGLRALDADLGAMKIQGLVLNQPYFGGVERTESELRLAEGRNLPLPANDLLWALALPDGADRDHEYSNPLAGGSYQEKIGRLQKCLVIGYGGDPLVDRQRRVVEMMEARGVHVVAKFKDGGHHGIECSDPSHAEAMDDDVKDFIDSTLHDFDPKH

SEQ ID NO: 138 - DNA, 1011 bp, Vitis vinifera
atggcagactctgtgccaccaccatcttccatggacgcttataagtccctcggcctcgtccctaacccagatggctctctcactcgcagtagcccatttccctctgtacccgctactgatgaaaccaccgccgccaccgacaccgctgtggctttttccaaagacgtgcccctcaaccccgccaacaacacctttctccgcatctaccggcctagtcttcttcctccaaacaccaagcttcccgtcatcttgtactttcatggaggtgggttcgttctcttcagcgtctctaatctgcctttccacaaatcttgcaactccatggcagctaagcttccagctctggtcctgtccctcgagtaccgtctcgcgccggagcaccgtctcccggctgcctacgaggacgccttcgaagccatcatgtgggtccggagccaggcggctgcggagatcgacggtggtgagccgtggctgagagagtacgctgatttttccaagtgctttttgatggggggcagtgcaggagcaaacatcgtgttccacgcaggtgtgcgtgcacttgatgctgatcttggggcgatgaagatccaagggctggtactgaatcagccctacttcggtggggtggagaggaccgaatcggaactgagactggcggacgatcggatcgtgccgttgccggcgaacgatctgctatgggcacttgcattgcccaacggcgctgatcgtgatcatgagtatagtaatccaatggcgggagggtcccagtcccaccaggagaagatcggacggctgcagaagtgtctggtgagagggtacggtggggatccactggttgacagacagaggaggtttgcggagatgatggaggcgcgtggggtgcacgtggtggctaaattcaatgatggcggtcaccatggcgtggagatctttgatccctcacaggctgaagctttgtataatgatgtcaagaatttcatttactccaccgcttcaaaatcaaccatgtga

SEQ ID NO: 139 - protein, 336 aa, Vitis vinifera
MADSVPPPSSMDAYKSLGLVPNPDGSLTRSSPFPSVPATDETTAATDTAVAFSKDVPLNPANNTFLRIYRPSLLPPNTKLPVILYFHGGGFVLFSVSNLPFHKSCNSMAAKLPALVLSLEYRLAPEHRLPAAYEDAFEAIMWVRSQAAAEIDGGEPWLREYADFSKCFLMGGSAGANIVFHAGVRALDADLGAMKIQGLVLNQPYFGGVERTESELRLADDRIVPLPANDLLWALALPNGADRDHEYSNPMAGGSQSHQEKIGRLQKCLVRGYGGDPLVDRQRRFAEMMEARGVHVVAKFNDGGHHGVEIFDPSQAEALYNDVKNFIYSTASKSTM

SEQ ID NO: 140 - DNA, 1008 bp, Vitis vinifera
atggcagactctgcgccaccaccatcctccctggactcttatgagtccgtcggcctcgtccctaacccagatggctctgtcactcgcagtatcgcatttccctcagtagccgctactgatgaaaccgccgccaccgactccgccgtggctttttccaaagatgtgcctctcaaccccgccaacaacacctttctccgcctcttccggcctcgtcttcttcctccaaacaccaagattcccgtcatcttgtactttcatggaggtgggttcgttctcgccagcgtctctgctctgcctttccatgaaacttgcaactccatggcagctaaggttccagctctggtcctgtcccttgagtaccgtctcgcgccggagcaccgtctcccggcggcctacgaagacgccgtcgaagccatcatgtgggtcaggagccaggcggctgcggagatcgacggcggtgagccgtggctgagaaagtacgctgatttttccgagtgctttttgatggggggcagtgcaggagcaaacatagtgttccacgcaggtgtacgtgcacttgatgctgatcttggggcgatgaagatccaagggctgatactgaatcagccctacttcggtggggtggagaggaccgaatcggaactgagactggcggacgatcggatcgtgccgttgccggcgaacgatctgctatgggcacttgcattgcccgacggcgctgatcgtgatcatgagtacagtaatcctctgtcgggagggtcctaccaggagaagatcggacggctacagaattgtctggtgatagggtacagtggagatccactgattgacagacagaggagggttgtgaagatgatggagactcgtggggtgcacgtggtggcgaaattcaaagatggcggccaccatggcatagagtgctatgatccctcacacgctgaagccatggatgatgatgtcaaggatttcattgactgcacgctccataattttgacccaaagcattaa

SEQ ID NO: 141 - protein, 335 aa, Vitis vinifera
MADSAPPPSSLDSYESVGLVPNPDGSVTRSIAFPSVAATDETAATDSAVAFSKDVPLNPANNTFLRLFRPRLLPPNTKIPVILYFHGGGFVLASVSALPFHETCNSMAAKVPALVLSLEYRLAPEHRLPAAYEDAVEAIMWVRSQAAAEIDGGEPWLRKYADFSECFLMGGSAGANIVFHAGVRALDADLGAMKIQGLILNQPYFGGVERTESELRLADDRIVPLPANDLLWALALPDGADRDHEYSNPLSGGSYQEKIGRLQNCLVIGYSGDPLIDRQRRVVKMMETRGVHVVAKFKDGGHHGIECYDPSHAEAMDDDVKDFIDCTLHNFDPKH

SEQ ID NO: 142 - protein, 325 aa, Populus balsamifera subsp. trichocarpa
MDPYEFLHLSPNPDGSLARNYLFPSVPPVEKPLSDPNKPQLALSKDIPLNPTKNTFIRIFLPSNQPPSTKLPVILYFHGGGFVLFSVASLPFHQSCCAMASNFPALILSVEYRLAPEHRLPAAYDDAMDSLAWVRDQAINGDDPWLKEYGDLSKFFLMGSSAGGNIVYHAALRALDADLSSIRIKGLIMNVPYFGGVNRTESEIRLKDDKILPMPANDLLWSLALPKDADRDHEYCNPIVAGSNDDGKIRRLPMCYVKIYGGDPLSDKQKEFSKMLESLGVHVVTSSDPDGYHAVELFDPRKAKAFYDEVKEFISTASPATNSSM

SEQ ID NO: 143 - protein, 217 aa, Populus balsamifera subsp. trichocarpa
MSTCSVKLTDLLDFVENPDGSLTRNSPFPEVPPTEQTTPDSKELSLSKDIPLNPNNKTSLRLFRPLKPPQKLPLVIYYHGGGFVLYSAATLAFHQTCSDMASHFPALVLSVDYRLAPEHRLPAAYEDAIEAMKWVQNQVLDINGPSCEPWLKEYLDYSRCFLMGMSAGGNIAYHANLLALNIDIKPLEIIGLILNMPYLLGLLPLCAAIIEHLQPIF

SEQ ID NO: 144 - protein, 325 aa, Populus balsamifera subsp. trichocarpa
MLASSVKLTDLCDFVENPDGSLTRNSPFPDVPPTEQITPGSKELSLSKDIPLNPNNKTFLRLFRPLNPPQNTRLPLIIYYHGGGFVLYSAATLAFHQTCSDMASHFPALVLSVDYRLAPEHRLPAAYQDAMESIKWVQNQVLDINGPSCEPWFKEYLDFSRSFLMGMSAGGNIAYHANLLALNIDIKPLKIIGLILNVPYFSAVTRTESEKRLINDPVLPLATSDRMWALSLPEDTDRDHEYCNPIVGGSLEKNKIKRLPRCFFRGYGGDPLVDKQKELVKMLESRGVDVVAMFDEDGFHGVEVFDPAKAKAFYDYVKEFVYTTV

SEQ ID NO: 145 - protein, 325 aa, Populus balsamifera subsp. trichocarpa
MLASSVKLTNLGDFVENPDGSLTRNSAFPDVPPTEEITPGSKELSLSKDIPLNPNNKTFLRLFRPLNPPQNAKLPLIIYLHGGGFVLYSAATLAFHQTCSDMASHFPALVLSVDYRLAPEHRLPAAYQDAMESIKWVQKQVLDINGPSCEPWFKEYLDFSRCFLMGMSAGGNIAYHANLLALNIEIKPLKIIGLILNVPYFSAVTKTESEKRLFNDPVFPLAMSDKMWALSLPEDTDRDHEYCNPIVGGSLEKNKIERLPRCFFRGYGGDILVDKQKELVKMLESRGVDVVARFDEDGFHGVEIFDPAKAKALYDYVKEFVCTTV

SEQ ID NO: 146 - protein, 295 aa, Populus balsamifera subsp. trichocarpa
MSTCSVKLTDLLDFVENPDGSLTRNSPFPEVPPTEQTTPDSKELSLSKDIPLNPNNKTSLRLFRPLKPPQKLPLVIYYHGGGFVLYSAATLAFHQTCSDMASHFPALVLSVDYRLAPEHRLPAAYEDAIEAMKWVQNQVLDINGPSCEPWLKEYLDYSRCFLMGMTVCRTTLNIVTESEKRLINDPVLPLAISDQMWALSLPKDTDRDHEYCNPIAGGSLEKNKIERLPRCFFRGYGGDPLVDKQKELVKMLESRGVDVVTKFDEDGFHAVEVFDPAKLKVLYDYVKEFVNTTVK

SEQ ID NO: 147 - protein, 322 aa, Populus balsamifera subsp. trichocarpa
SSVKLTDLCDFMENPDGSLTRNSAFPDVPPTEQKTPGSKELSLSKDIPLNPNNKTFLRLFRPLNPPQNTALPLIIYFHGGGFVLYSAATLAFHQTCSDMASHFPALVLSVDYRLAPEHRLPAAYEDAMESIKWVQNQVLDINGPSCEPWFKEYLDFSRCFLMGMSAGGNIAYHANLLALNIDIKPLKIIGLILNVPYFSAVTRTESEKRLINDPVLPLATSDRMWALSLPEDTDRDDEYCNPIVGGSLEKNKIERLPRCFFRGYGGDPLVDKQKELVKMLESRGVDVVARFDEDGFHGVEVFDPAKAKAFYDYGKEFVYTTV

SEQ ID NO: 148 - protein, 333 aa, Populus balsamifera subsp. trichocarpa
MSGQTSPSNPTITDPYQHIQIIPNHDGTITRDPNRYPNSSPSPDPKDPTPVLSKDIIVNQSEKTWVRIFLPRQTIVDSSSTSKLPLIVYFHGGGFINCSASSTVFHDFCSSMVLDLHVVIVSVDYRLAPEHRLPAAYDDAMEVLQWIKTTQEDWLREYVDYSRCFLMGSSAGANAAYHAGLCASQEADNLVPLKIKGLILHHPFIGGVQRTGSEVKLVNEPHLPLCINDLMWNLALPLGVDRDHEYCNPMVDGGSKLWKNVRLLGWKVMVTGCDGDPMIDRQMEFVDMLVTKDVRVVGHFSTGGYHVVELKEPSKAKALHALLKDFMLDAPAA

SEQ ID NO: 149 - protein, 326 aa, Populus balsamifera subsp. trichocarpa
MPELDPYEYLNIRIDPDGTVTRLLNLPPANANPDLNSGAAVFSKDAILSEEKNTAVRIYLPSNIITKHAAAATTVNEKMRLPIVFHFHGCSWVQFRANSTILHASRSLFAFTIPAIVILVDYRLAPENRLPAPYEDATDALLWLQKQALDPQGEKWLKDYGDFSRCYLHGSGCGGNIAFNAALRSLDMDLSPLKIDGIILNQPLFGGRKRTKSEMKFLADQVASLPAMDLMWELALPEGADRDHPFCNPMADGPHKSKLRSLQRCLVFGFGRDPLVDRQQEFVQMLILHGANVEACFDDSGFHRIDIVDPQRAAILDEIAKGFIDS

SEQ ID NO: 150 - DNA, 1186 bp, Abutilon theophrasti
ataagagtttagaattagaaccaaaactgttcaatgtcgggtcaaactattccaccacacatcacggatccgttcgaataccttcaggtcgtcctcaaccccgatggcaccctcacccgcaatttcaacagattcccctccgttgacccgacaccccatgatccccacaaccagactccagttctctccaaagacgttcccatcaacccatccaacagcacatgggcacgtatatttctaccccgtcaagagttgttggaccgttcttcttcatcccccaacaacaacaagttgcctctcatagtttacttccatggcggagggttcattctcttgagcgcaaacttgaccattttccataactcttgctgcgacttggccaacactgtccccgccgttgttgtctctgtggaataccgcctcgccccagaacaccggctgccggcggcttacggagacggagtggaagcgttgcaatggataagaagggctgaagaagtgtggttgagagagtatgctgatttttctaattgtttcctcatgggatcaagtgcgggcggtaacatagcttaccatgtagggttacgagcggcggggatggtcgaggagctagaaccgttgaagatcaaagggctggtgttgcatcagccgttctttggtgggacagagaggagagggtcggagtttaggttgatgaacgatccagttttgccaccgatcgttagcgatgtgatgtgggatttgtctttgccagttggtgttgaccgtgatcacgagtatagtaatccgacggtgggaggcggggcaaaggagttggagaaagtcaagatgctgggatggaaggtgatggtaaatggatgtgatggggacccactcgtggaccatcagatggaggttgtggaattgatggaaagcaagggtgtgcaagttgtaaagaattttagggtgggaggctttcatggacaagaagattttgatatgtccaaggcacatgccatgcacatgctcattaaagatttcattgtatcttttactttctgagtgtaaagaaaagtttatataagaaaataattcaagattaagtgcgtgtcaaatattttacgaattataataatataataaaatatgacacttgaccttatattagtaattattattttctcaaaaaaaaaaaaaaaaaaaaaaa

SEQ ID NO: 151 - protein, 335 aa, Abutilon theophrasti
MSGQTIPPHITDPFEYLQVVLNPDGTLTRNFNRFPSVDPTPHDPHNQTPVLSKDVPINPSNSTWARIFLPRQELLDRSSSSPNNNKLPLIVYFHGGGFILLSANLTIFHNSCCDLANTVPAVVVSVEYRLAPEHRLPAAYGDGVEALQWIRRAEEVWLREYADFSNCFLMGSSAGGNIAYHVGLRAAGMVEELEPLKIKGLVLHQPFFGGTERRGSEFRLMNDPVLPPIVSDVMWDLSLPVGVDRDHEYSNPTVGGGAKELEKVKMLGWKVMVNGCDGDPLVDHQMEVVELMESKGVQVVKNFRVGGFHGQEDFDMSKAHAMHMLIKDFIVSFTF

SEQ ID NO: 152 - DNA, 1138 bp, Abutilon theophrasti
agaagctaagcttgagcatcaagaaaataaaacaatggccgctgaaacctccactatcgatccatatgaataccttaaaatcagcctcaatcccgacggcacattaacccgccccaacgattccttcccaagaacttcagccgacatctcctccacaactgcagttctctccaaggacatccctatcaacccagaaaacaacacttgggctcgaattttcctgcctaaacaatcacttcccatttcgcctaacaagctaccccttttattatatttccacggtgggggcttcgttatcggttttccagatttagcaatgttccatgaattttgctcaaacattgctgctgaactctctgttatagtcatatcagcaagctaccgcttggccccagagcatcggttgccagcagcatatgatgatggcatggaagcattgcattgggtcaaaacagtccagggtgattggctgagagatcgtgctgattactcaaattgtttcttgatgggttctagtgcaggagctaacctggcctaccatgtaggattacgtgcagctcaagaaatagatggtctttcacccctgaagatcaaaggcttgataatgcatcaacctttttttggtggagtcgaaaggactaattcagagttgagattagtgaatgatccatatttcccaccatgtgttagtgatttaatgtgggagttatgtttgcctctcggtgctgaccgtgatcacaagtactgcaacccgacggcagacgaggacagcttggagaaggtcaaagggctaggattgagggttttggttacaggatgtgatggagatcagatgatagaccgacaaaaggagttggtgaagatgatggagaagaagggaataaaagtggtaggtcggtttggtgaaggaggctgtcatgggcttgaattttttgattcctctaaagccaatgcattgcaccctgtattaaaaaactttatcttctcttccacataagcttgtttttattaagctacacccattttgtgggatttacttgttatgagcttctattgtgccaaacaaaggaaacatggtgataaataaatctcaataattaattttgtatttgaaaaaaaaaaaaaaaaaaaaaaaaaa

SEQ ID NO: 153 - protein, 320 aa, Abutilon theophrasti
MAAETSTIDPYEYLKISLNPDGTLTRPNDSFPRTSADISSTTAVLSKDIPINPENNTWARIFLPKQSLPISPNKLPLLLYFHGGGFVIGFPDLAMFHEFCSNIAAELSVIVISASYRLAPEHRLPAAYDDGMEALHWVKTVQGDWLRDRADYSNCFLMGSSAGANLAYHVGLRAAQEIDGLSPLKIKGLIMHQPFFGGVERTNSELRLVNDPYFPPCVSDLMWELCLPLGADRDHKYCNPTADEDSLEKVKGLGLRVLVTGCDGDQMIDRQKELVKMMEKKGIKVVGRFGEGGCHGLEFFDSSKANALHPVLKNFIFSST

SEQ ID NO: 154 - DNA, 1263 bp, Abutilon theophrasti
caaaatctcaacaacttttcacttcttttaacccatcatagtttcctataatggctgccattgctattgatccaagttgtaccctacaaatcgggagaggctcaaaccaacatggcgttgtgacagaagaaattcaagggctgatcaaagtgtacaaagatggacatgtggaaagaccccagattgttccgtatgttagcccaacattaccaccggagttgggtgtgactacgagagactgtgtcgtcgaggagttcacaaatgtttgggcacgtttttatgtcccgaaatcaaacaggaagctccccttggtcgtttactttcacggtggagggttctgtgttggctcggctggttggagttgctaccatgagttcctagcgaacctggccgtcaaagccggttgtttgatcgtatctgttaactatcgtttagcccctgaaaacccacttccggctgcttacgatgatggggtcaagtctcttgtgtggctaaaacaagaagcactaaatgggaccggtgcatggtggtctaaacagtgtgatttttgtagtgtcttcttagccggtgatagtgctggtgctaacattgcacataatgtggtcacacgacttggctcggctaatctttactaccctttgaaccttaaaggtactatcttgatccaaccgtttttcggaggagaaacacgtaccgattcagaaaagaacacggcccaatctcctcgttccgcccttagcctacaagcttcggatacatattggcgattggcattgccttgcggcactaaccgcgaccatccgtggtgcaatccgttgggaaaagggtcggcgaaaatagaggagacgaggctcatgaaaaccttagtgtgcatgtcggagatggatatattgagagacaggaatttggagttctgtttagctttgtgtaaagcagggaagaaagtggagcatgtggtatacgaaggtgtggggcatgcatttcaggttcttagcaagtctcagctctcacaaactcgaacccatgaaatgatagcgcatgtcaaggccttcgtttatcagtgataaaaataagataatgatcttgtgtaaatttgtgtgtaatgtaatagtcccaaagtagtcgtccatggctggtagtgctgatcatgaggtccgaagtgcatgtacatttctaaatactgtgtatatagacaagtttataaatatatatataattgaaattatataagtggtagagaaaaaaaaaaaaaaaaaaaaaaaa

SEQ ID NO: 155 - protein, 337 aa, Abutilon theophrasti
MAAIAIDPSCTLQIGRGSNQHGVVTEEIQGLIKVYKDGHVERPQIVPYVSPTLPPELGVTTRDCVVEEFTNVWARFYVPKSNRKLPLVVYFHGGGFCVGSAGWSCYHEFLANLAVKAGCLIVSVNYRLAPENPLPAAYDDGVKSLVWLKQEALNGTGAWWSKQCDFCSVFLAGDSAGANIAHNVVTRLGSANLYYPLNLKGTILIQPFFGGETRTDSEKNTAQSPRSALSLQASDTYWRLALPCGTNRDHPWCNPLGKGSAKIEETRLMKTLVCMSEMDILRDRNLEFCLALCKAGKKVEHVVYEGVGHAFQVLSKSQLSQTRTHEMIAHVKAFVYQ

SEQ ID NO: 156 - DNA, 1190 bp, Abutilon theophrasti
actaaccccattcctcattttccattctcttcctatcttctttaatggcgacccaaacaccacaatccgactccctttctttaccttttaaaacccgtatccaactcacgttcctcaacttcgttactgacgccgttcgtcgtaataacggaaccattaaccgtcgtgtaatgaactttctagatcgccgttcacctcctaaccctatcccacacaattccgtttcatcccacgacgtcgttgttgacccttcaaaagatctttggtttcgtttatttatccctcacaatcaaagcgacactgtttcatctctccctattatcgttttctttcacggcggtggtttcgcttttcttagcgcttcatcttatgcatacgacgccgtttgccgacgctttactcgtaaactaaacgccgtcgtttgttccgttgaataccgtctctctcctgaatataaattcccttttcaatacgacgacggattctctgtccttaaattcctcgataatcccaaacaaatccctaattttcctcaaaacgccgacgtttcatctgtattccttgccggcgattccgccggtggtaacttggcccaccaccttgccgtgaaattcgccacgtcatcagctactttctcgaaactcaacgtaatcgggttaataaatatccaacccttttttggcgggaatgaacgagttgactcagagattgaacttgagggagctccgattgtatcaatggcgagaactcaatggttatggaaggcgtttcttcctgatggggtggatttggatcactgggcagtgaatgtaagtgggcgtaatgctgtggatattagtcgtgttgaatttcctccgactgtattgtttgttggtggatttgacccgttgaaggattggcagaaaaggtattatgagtggttgagaagaaacaggaaagatgtgaagttggtggagtattctacggctattcatgctttttacgtttttccagaattgcctgagacaagtaaattatttgatgagattatggagttcatcgggaaacagatttccaaagttaggtgaagaaataggggaggaattattaatgtttgtgtttatttttattatttgttttcctatttacgtgtatactaatttatagaataataatgctgattctattctcaaaaaaaaaaaaaaaaaaaa

SEQ ID NO: 157 - protein, 340 aa, Amaranthus hypochondriacus
MATQTPQSDSLSLPFKTRIQLTFLNFVTDAVRRNNGTINRRVMNFLDRRSPPNPIPHNSVSSHDVVVDPSKDLWFRLFIPHNQSDTVSSLPIIVFFHGGGFAFLSASSYAYDAVCRRFTRKLNAVVCSVEYRLSPEYKFPFQYDDGFSVLKFLDNPKQIPNFPQNADVSSVFLAGDSAGGNLAHHLAVKFATSSATFSKLNVIGLINIQPFFGGNERVDSEIELEGAPIVSMARTQWLWKAFLPDGVDLDHWAVNVSGRNAVDISRVEFPPTVLFVGGFDPLKDWQKRYYEWLRRNRKDVKLVEYSTAIHAFYVFPELPETSKLFDEIMEFIGKQISKVR

SEQ ID NO: 158 - DNA, 1510 bp, Amaranthus hypochondriacus
aaaaaaaatcatgtggcctggaattaaagtgctcaaacacaccccttccttattacccactttctgcaaatccattactccatcaccctcaattatacacccaaaaatctcaactacattcccaaatcattcatcgttttcaataaaacccagaatcacaacccaaatcccagcaacccaacaaactaataatcaaatcatgccttcttacacaaacccggaaacaactaatttccactactcagaatcagacattgcccagaaattcctgttcttcaatgttcttaaagatggtagaatccatatcttacaacctccgatgaagaaaattccgccttcttcatacccatcttcaaatgttttaatcaaagatgttgagatcaatcctgatgtctctgctcgaatcttccttcctaaatcgtgtattgaatctaccggaagaaaactacccgttttgctctacattcatggaggcgggtattgtaagaattccgcgttctcggaagattacactcgttttatggccgatatttcttcggaagctaacgtcattgctgtctccgtcgagtacggtcttttccccgaacgaccgatcccagcttgttacgacgattcatgggctgcactccagtggattgcggctcacagtaaagggtctggacctgacccttggatccatggatatgctgatttaggtaaaatctttgttggtggggattctgccggtgggaatatctcacattatttgttagctaaagtagggtctatgggactaactggggattcaaaagttgaagggatgatattgattcatccttattttggggaggatgataaaatgtggatgtatatgtgccctacaaatgaagggccacaggattataggatgaagcctgctgtagaggatttagctaggattgggtgtggtagggtgttggtgttgcttgctgatcatgatgggttgtatggtgtagggaagatgtatgctgatgaattggtaaagagtggatggaaaggaaaggtggagattatggttaatgaaggaaaagatcattgttttcttattgctgatcatttggatcctgaggctgttgcggttcggaaacggatcgcttcgtttattcaaaattaggtggatccgagagtaaaagatagtatctcgacatatgaaagatgattttgaatgtgtgtaagatgttggatttgagtacaagatactatctcgacataaggaagatgagtttttggatgtgcagtgtgtaagatgttggattcgagtacaacaatcaagatactatctcgctatatggaagatgattttgacatgcgtaagatgttggatcttagtataagatactacctcgacatatgaaagatgattttggacgtgtgtaagataagatgtttgattgcatgtagtcaatcaatttaattaaaacgtgtcgatgattattttaatttaagctttattttagtaagtacttatttttaaaaaaaaaaaaaaaaaaaa

SEQ ID NO: 159 - protein, 373 aa, Amaranthus hypochondriacus
MWPGIKVLKHTPSLLPTFCKSITPSPSIIHPKISTTFPNHSSFSIKPRITTQIPATQQTNNQIMPSYTNPETTNFHYSESDIAQKFLFFNVLKDGRIHILQPPMKKIPPSSYPSSNVLIKDVEINPDVSARIFLPKSCIESTGRKLPVLLYIHGGGYCKNSAFSEDYTRFMADISSEANVIAVSVEYGLFPERPIPACYDDSWAALQWIAAHSKGSGPDPWIHGYADLGKIFVGGDSAGGNISHYLLAKVGSMGLTGDSKVEGMILIHPYFGEDDKMWMYMCPTNEGPQDYRMKPAVEDLARIGCGRVLVLLADHDGLYGVGKMYADELVKSGWKGKVEIMVNEGKDHCFLIADHLDPEAVAVRKRIASFIQN

SEQ ID NO: 160 - DNA, 1249 bp, Amaranthus hypochondriacus
aaaatcctcaatatccatctgatttctcccatcattttcaccagctacaaaataaagatcacacaaaaacaaaatatgccttcttacaccaacataaatacaactaattggaactatactgacttagacattgcccaaaagttcctgttcttcaatgtccttaaagacggtcgcattcatgtgttcttgcctcctgttgttaaaatccctccgtcctcctacacctcctctggtgttttaattaaagatgtggatatctcctcggatctttctcttcgaatttttctcccttcctgtacatcttcaggaattaaacttccggtttttttctatatccatggcggagcgtactgtacaggatctgctttttcagaagagtacacacgctttgttgctgatattactgttaaagctaatgtcatttcagtctcaatcgagtacagtctcttccctgagcgtaaactccctgcctgttatgaccaagtatgggctgcactccagtgggtggcatcacacaataacggctctggacctgacccctggatcaatcatcacgctgatcttcaccggatttttatcagtggagattcagtaggtggaaatatgtctcattttttgttagctaaagtagggtctttgggaatgggacttcctgggtatgctaaggtagaagggatgatcttgattcatccttattttgcggagcgagacgaaaattggatgtacatgtgtcctaataatgaagggcctcaggattctaggatgaagcctgctgtagaggatctggctaggattggatgtaataaagtgttggtaatcgttgctgaaaatgatagatttggattgtataatattggggcgaattatgtggaggatttgaagagtagtggatgggaagggacagttgagatgatggtgaacaaaggaaaagatcattgctttatgttttctgatcatttggatgctgaggctgtagctgttcgtaaaaggattgtttcgttcatcaataatgaagatcttgagtcttagacaatgtattagctcacaagtatcgtattaaatggttctattgcagttttgcaatgttatttgtaattgttcttgacctcttgatacattgttttaatttgtaagatcaactgaatcttttaatggtaattcaatacctatctcatgttgttgatgtataattaattgattatattatgaataacagacgtttttagttgaaaaaaaaaaaaaaaaaaaa

SEQ ID NO: 161 - protein, 317 aa, Amaranthus hypochondriacus
MPSYTNINTTNWNYTDLDIAQKFLFFNVLKDGRIHVFLPPVVKIPPSSYTSSGVLIKDVDISSDLSLRIFLPSCTSSGIKLPVFFYIHGGAYCTGSAFSEEYTRFVADITVKANVISVSIEYSLFPERKLPACYDQVWAALQWVASHNNGSGPDPWINHHADLHRIFISGDSVGGNMSHFLLAKVGSLGMGLPGYAKVEGMILIHPYFAERDENWMYMCPNNEGPQDSRMKPAVEDLARIGCNKVLVIVAENDRFGLYNIGANYVEDLKSSGWEGTVEMMVNKGKDHCFMFSDHLDAEAVAVRKRIVSFINNEDLES

SEQ ID NO: 162 - DNA, 1453 bp, Amaranthus hypochondriacus
aaatcaattcataacaaaaaatctcttattataattaataccctcttccaacataagctagccatgactatacaagagagaaaggtagttgatgaggtctctggctggcttaggatttttgacgatggttcggtcgaccgaacctttttcggcccacccgaggccaagtttatggttgattcagttccggcccatgaagactttgtcaatggggtagcagtccgtgatgtggatcccaaaacgggccctcgggtccgggtatacatgccggaaaccctacctgaggatgacccgaatgagaagctacctattgttgtccactttgccggtggtgggttttgcataagccagcccgattggtttatgtactatgctgcttacacccagttagcaagaatgggccgggtcattgtcgtctcggtctatctcccattagcacctgaaaaccgacttcccgctgccattgatgacgggctttcatcccttttatggctttcctcactggcccgatctcaggcccatgagtcatggctcacaaataagggggactttacacgagtttttctaattggggatagttcggggggtaatttagtgcatgaagtaggggtccgagcagggaaaaccgatttaagtccattaaaattaagcgggttaatcccggtccatccaggaataacccgagccacaaggagtcgatccgagttagaaatgccccaaaccccatttttaactttagacatggtggataagtttctaaggctaggtttaccaattggaagtaccaaagatgacccaataacatgtccaatgggtcccacagctccttcactaagtggggtccacttacctccaattatgtattgtgtagctgatcaagatttatttattgacacacaaatggagttttatgagtcattaaaaaaggcaggaaagaaagttgaagtgtttgtgagtaaaaatatgactcatagcttttacttaaataagatggcagtagatcatcatcctgagactaaactccaaactgaaacactttttcaagcaataattaattttataagcaaacattgaaaagtgaaatacccaacttagaggtgttcattcgggtcatgggcgggttgatttcgagtcagatgtttctggtcggttcaaaatcgggttttgtgttcacattagtttttacataattgtagatccatttttaagtctggtcaaatcggattcgtttataaagtcggatgtctatcggatcatcgggtctgttttgaacacctctaagacaagcaaataatcaactatatattggtgttatgatattcaagtagtgatctctaaggagtcttttggatcatgtttatgttgcatttgatgccttttatataataaaatataatatgtttccttgttaaaaaaaaaaaaaaaaaaaaaaaaaaaaaaaaaaaaaaaaaaa

SEQ ID NO: 163 - protein, 336 aa, Amaranthus hypochondriacus
MTIQERKVVDEVSGWLRIFDDGSVDRTFFGPPEAKFMVDSVPAHEDFVNGVAVRDVDPKTGPRVRVYMPETLPEDDPNEKLPIVVHFAGGGFCISQPDWFMYYAAYTQLARMGRVIVVSVYLPLAPENRLPAAIDDGLSSLLWLSSLARSQAHESWLTNKGDFTRVFLIGDSSGGNLVHEVGVRAGKTDLSPLKLSGLIPVHPGITRATRSRSELEMPQTPFLTLDMVDKFLRLGLPIGSTKDDPITCPMGPTAPSLSGVHLPPIMYCVADQDLFIDTQMEFYESLKKAGKKVEVFVSKNMTHSFYLNKMAVDHHPETKLQTETLFQAIINFISKH

SEQ ID NO: 164 - DNA, 1114 bp, Amaranthus hypochondriacus
atcaatcgaatctcgcttttcttccgtttctctcatctcaccgcttaaccttccgagaaaaaatggaggttgtgcagtccacagaaattcttcacgacttcgctcctcgtctccgagtctacaaagacggccgaatcgaacgcctcttgaaaaccaacactgtcccaccctctttcgacccgattacccgcgtcgattctaaagacgtcgcaatctgtccgggtatttcggcccgcatttataaacccgacaaaacatcaccagaaaaacccaaactacccattctaatctacttccatggcggagctttctgtctctactctgcttcctcttcaatctaccaaaattaccttaattcgctggtctctgaatccggttgcatcgcggtttcggtcgattaccgccttgcaccagagtatccgatgcccgtttgttatgacgattcatgggtagcgactcagtgggtcctctctcattcaaacaggttgggtcctgagtcatggctaaacgagttagcagattttgaccgagtcttccttgcaggggatagtgccggggcaaatatcgtccacgacattgtgactcgggctgagtcaacaaggttttcagggatcgctatgattcaccccttttttggagatggtgaggtcaacccgctttggaattatctgtacccagattcaatcggggtattagacccccgattaaatccgacggcgaatccgattaaaatgagaagagaactaatcgggtgtgacagggtgttggtttgtgtaggtgggaaagatttcttaagagaaagagggatagaatattttcaagtactaagagaaggtcaagaaaatggcgaatggaaaggggaattggaattcatggagagtaaaggaagaggccatgtttatcatttatacaaacctgaatgtgaagaagccaaacaactccttaaaagagttgctcagtttatcagtaacaaatctgcatctcattttcttgtttctttagaaatttagccttaatttcatgtatgtgatgaagcttgaatgttatttattgtattagttcgataattttctaactggagatttcttattacaaaaaaaaaaaaaaaaaaaaa

SEQ ID NO: 165 - protein, 315 aa, Amaranthus hypochondriacus
MEVVQSTEILHDFAPRLRVYKDGRIERLLKTNTVPPSFDPITRVDSKDVAICPGISARIYKPDKTSPEKPKLPILIYFHGGAFCLYSASSSIYQNYLNSLVSESGCIAVSVDYRLAPEYPMPVCYDDSWVATQWVLSHSNRLGPESWLNELADFDRVFLAGDSAGANIVHDIVTRAESTRFSGIAMIHPFFGDGEVNPLWNYLYPDSIGVLDPRLNPTANPIKMRRELIGCDRVLVCVGGKDFLRERGIEYFQVLREGQENGEWKGELEFMESKGRGHVYHLYKPECEEAKQLLKRVAQFISNKSASHFLVSLEI

SEQ ID NO: 166 - DNA, 1683 bp, Amaranthus hypochondriacus
agcattaaaatttagccactttgatttgagattgtttattgctgtcttcaacccccttcttcaaccccctccaaaaaaaaaaaaaaaaaaaacttgtacttaattagatattaatgatgatcaaatgaactgagctaggccttgatcattcagttttcaacatcaactaataaggcagcaagagatcaagatcataagatggattcaagttgtaatacgaaagaaaaaagggatgagatactcattgacgcttcaccaataatccggctatacaaaagcggccgtgttaaacgactgccattgctagaccctcctccagtccctccatccatggatccaattacaggggttatatccaaagacattaaaatctccattaaaacaggagtcaaggtccggatctataacccatgcccatcaaattccaattataaaaccaaaatcccactcttaatttactttcatgggggtggattttgccttgaatctaccttttctaaaaaatatcacaattatctgaatcaattagcttctaaagcgcgagtgatgattgtttctgttgagtatagaagagcccctgaacatcgtcttcctgctgcttatgatgattgttgggatgctcttaaatgggttctttcttatactgataatggtgattattgttcaaataatacaagaatatcagaacaagaagatgaagaagaaggatggattcggaatcaagtagacttttctagaatcttcttaatgggagatagttcggggggtaatattgcacatcatgtagcattgcgagttgggattcaaggtttaggcaagctccaaagattagaaggcataattttggtacacccatttttttggggaaagcagcgaatcggaaatgaggtagcgaaatgcattcggttgcatattccagatctgtccgacaaaatgtgggcattagcaagccctatagacagttgtggagttgacgaaccatggattaacccggcaaaagacccgaatttaccgaaactaggatgcaaacgggtcctggtttcgattgctgagaaggattcattgagtgatcgaggagtgtactacaaagaggctttggagaaaagtgggtggaaagggagtgtggaattgctacaatcttatggagaagatcatgtctttcatttgcttcacccttcttctactaattctcttcagcttatcacaaaagttgtagcttttctcaatcctacaacgtctagactttgaatttttggataaaataaattctactctctcctctttgatttgcatcgaagagtaattgaggtagttttaagggagtggtattaaatgaagactgatgatgaattgtgttgatgaaattttaagagtgttataatgtttggatgatattaaaataaagtggtagaccattgtccaaaaatagaaatgatgtaaattaattgggacggccaaaatagaaaatgatggaaattcaatgggacagagactgtctcaaaaatataaattccctgtttcgtttgaagttctctcaccgagagacaatcacttacaaaaagtaattttacttcttttagcttctactaggtttactctcttatgtataattaatattattagagataactttaagattgcaaaatatacattgagttagcccaaaaaaaaaaaaaaaaaaaa

SEQ ID NO: 167 - protein, 349 aa, Amaranthus hypochondriacus
MDSSCNTKEKRDEILIDASPIIRLYKSGRVKRLPLLDPPPVPPSMDPITGVISKDIKISIKTGVKVRIYNPCPSNSNYKTKIPLLIYFHGGGFCLESTFSKKYHNYLNQLASKARVMIVSVEYRRAPEHRLPAAYDDCWDALKWVLSYTDNGDYCSNNTRISEQEDEEEGWIRNQVDFSRIFLMGDSSGGNIAHHVALRVGIQGLGKLQRLEGIILVHPFFWGKQRIGNEVAKCIRLHIPDLSDKMWALASPIDSCGVDEPWINPAKDPNLPKLGCKRVLVSIAEKDSLSDRGVYYKEALEKSGWKGSVELLQSYGEDHVFHLLHPSSTNSLQLITKVVAFLNPTTSRL

SEQ ID NO: 168 - DNA, 1717 bp, Amaranthus hypochondriacus
ggcctacttcactaaaattgttaaacggctttactcaccacaaccactcatttttctctacccaaccccaaccatccttctacacattaattcttatcttttcctacccaccccttaccacacttacttgggaaacaatccctacttcttaacacaaaaacaggggaagatttttgtttaaggattggttttcaaccagagcactctaccaactctaaaacaacaatggaagaagcaatgaaagcaatggcagcaatcaacccagaagatatagcccaagattaccgaccctttttagttatccacaaagacggaaccgtccagagattcataggcacagaacatgtgccaccctccgtcgatgccgacacgggcgtggagtcacaagacgtggtggtaacccctgaagaacacggcggtgtttgggtgcggctatacaagccaaatccaaaagataaccatatgggtcgattacccgtgcttgtgtactttcatggtggaggcttctgtgttgaatctgcagcatcgcctccgtaccataatcacctcaattctttgtctgctaaaggtaatttgattgtggtatctgttaattataggcttgcaccggaattcccacttcctacggcgtatgaagattcatgggaagctctaaaatgggtcgaaaatggatgtggagatgggtataaatggatccaggagtacgcggatctggatcgtgtgtatttgggtggagatagtgcaggtgctaacattgctcatcatatggcaaagagattagggttaagaacagaaaaggggaaattgaaattgaaaggaattctgttaatccacccatatttctggggatccgaaaggattggatccgagctccagaaaagggggaaggatgaagaaggagggggattagcagagaaattgtgggcatttgcaaatccaggatccagtgggatagatgacccgttaataaacccgggtaatgacccggaattggggtgtttgggtggggaaaaggtgatggtatgggtggcagagcaggatggattgagagatagggggttttactacaaggaggtgttagttaagagtggttgtaaggcaaaggtggaagtggtagaaactcttggtgagaatcatgtatttcatttggtgaatccgggttctcctaatgtggatccgtttatgaatcaggttattcagttcatcaactcttcttagacctcttcatatgagaagatactatgccggattccaacctgtgcgggatactgtgttaatgagttgtctcagactctgacctgtacggaatattgtgttgatgagttatctcggacactgacctgtgcaagatagtgttttggtgagctatgaattatgactaaaattacatgagaagatactattttccattaataatggcatcatttttttaagtttttgttaatgaatggtttaaaattttcttttatgtgtgcaagaacccaagattgtcttgcattgcatgatttcattagatcaattgcaataataattcaaaagtaatgtgatttgtgtagatttaatctcattaaattgtaggctctttttatttacctgaaactacatgtataatatttgatattaccatagaaagttagaaattcatgcaatgtacgaaatattaattgctataaaaatttaaattaaatgtcatttcaaaaaaaaaaaaaaaaaaaaa

SEQ ID NO: 169 - protein, 330 aa, Amaranthus hypochondriacus
MEEAMKAMAAINPEDIAQDYRPFLVIHKDGTVQRFIGTEHVPPSVDADTGVESQDVVVTPEEHGGVWVRLYKPNPKDNHMGRLPVLVYFHGGGFCVESAASPPYHNHLNSLSAKGNLIVVSVNYRLAPEFPLPTAYEDSWEALKWVENGCGDGYKWIQEYADLDRVYLGGDSAGANIAHHMAKRLGLRTEKGKLKLKGILLIHPYFWGSERIGSELQKRGKDEEGGGLAEKLWAFANPGSSGIDDPLINPGNDPELGCLGGEKVMVWVAEQDGLRDRGFYYKEVLVKSGCKAKVEVVETLGENHVFHLVNPGSPNVDPFMNQVIQFINSS

SEQ ID NO: 170 - DNA, 1282 bp, Amaranthus hypochondriacus
atatatcattcacttctcccttgagaaaactaaaacatacccatttcaattttttcaactacttacaaactttcatccatggttgtgtcaaaccctacaatcaatcaaaacattgattatcttgaaatcaacccgaaacccaaacccgacgatccaacttctatagttgaagaaattgaaggtgtaatcaagttgtacaaaaatggttatgtagaaagatcaaccaaagttatgtcaagtgtttctccatatttggattctaatttacaagttaatgctcgcgatgtttttattgacaaaaatgataatatttgggcacgtatatatgtacctagatgtaacaaaaataataattcgttactaccaataatggtttattttcatggtggagggttttgtattggctcaactgcatggaaatgttaccatgatttcctaggaaaattatcgtcgcaagctcagtgtgtgattgtgtcggtaaattaccgtctagcgccggaaaatccgcttccagccgcttatgaagatggaatgaaagctttgatttgggttaaacagcaaggaaatattggtcattctagagaatattgggcaaaatattgtgatttttctagcatttttttgggtggggatagtgctggtgcaaatatagcctataatgtagccttaagacatggtatgtcaaatagtaacaatattaagggaattgtcttaatacaaccatttttcggtggggaggaaaggactaattcagaattatcgtcaattaaggttcaattacgtaaatcagcgttgagtttagcggcttctgatatatattggcgaatagcattacctttaggggcgaatcgaaaccacccttggtgcaatccgttacttaaagatatgaaatggctggaaaaaattaggattatgatatatgtagccgagaatgatatattaaaagataggaatttagggttttgtgatgttttaagtagcaatttggggaatcaagtagaccattttatttctcaaggtgtgggacatgcatttcagattttggatgattctaccatttctcaaaatcgtaagaaagaaatgatttttaatattgtcaactttattggaaaataatttgatgaatagcaaggattagttgggtttttttttttatttcaagatttattgttcaatagaatagaacgaaaaagaatagatacagaaaatgaccctttttgtaatgtattttcgttgtatgaaaatcataatgtttatatttcgaaaaaaaaaaaaaaaaaaa

SEQ ID NO: 171 - protein, 345 aa, Amaranthus hypochondriacus
MVVSNPTINQNIDYLEINPKPKPDDPTSIVEEIEGVIKLYKNGYVERSTKVMSSVSPYLDSNLQVNARDVFIDKNDNIWARIYVPRCNKNNNSLLPIMVYFHGGGFCIGSTAWKCYHDFLGKLSSQAQCVIVSVNYRLAPENPLPAAYEDGMKALIWVKQQGNIGHSREYWAKYCDFSSIFLGGDSAGANIAYNVALRHGMSNSNNIKGIVLIQPFFGGEERTNSELSSIKVQLRKSALSLAASDIYWRIALPLGANRNHPWCNPLLKDMKWLEKIRIMIYVAENDILKDRNLGFCDVLSSNLGNQVDHFISQGVGHAFQILDDSTISQNRKKEMIFNIVNFIGK

SEQ ID NO: 172 - DNA, 1153 bp, Artemisia tridentata
gatggacactaaaccatctccaaccctctccttaccatggaaaacccgcattttactcaccatcattaccacggtatccgacgccgtagtccgtaaaaacggcaccataaatcgtcgtctcctcaatttcctggacttcaaagcaccccccaccccaaaatccctgaaaggtgtaacatctcacgacataatattagacaagacgcgaaacctttggtatcgcgtcttcatacccacgaaacatgcaaatgagccacttccagtgattatgttttatcacggaggtggctttgtattcctatcgccagatgtcctcgcgtacgatgcagtatgcagacgtttcgcgaggaaaggaccagcgatagttgtttctgttaattataggcttgcgccggagcacaagtatccggcgcagcatgatgattgttttgacgtgttgaagtttttagatgacgatttggatatgagtaagagtatgttaccgaaaaatgcggatttgagtagggttttcgttgttggtgatagtgcgggtgggaatttagctcatcatgttgcttatagagcttgtggatttgatttcaagcgacttaaggtagctggagtggtagcaattcaaccattctttggcggtgaagaacggacagattccgagttgagactcgaagggacgccaatagtttcagtgaaacgaaccgattggacatggaaggcgtttttgccacaaggagaagggttcaatcgcgatcatccaattgtcaatgttagcggacccaatgcaatggacatatccaaaatagactttccgccaacaatggtcgttgttgctggttttgacgctctacacgactggcaaaaacggtactatgaatggctgaagaaatctggaaaagaagcatacttgtttgaataccctaatatgtgtcatgccttctatatcttcccagaattacctgaaggtgcacaactaattggccagatatgcgagttcattcgcaagtattgaacaatgttggcacctgattaacaagtatgtaacttggttaataacttgtttttatttctcgtgtattaaagttgtaccagatatattttctttggtacatttttgtctacttggtatgaatttggtgtttgaaccgaaaaaaaaaaaaaa

SEQ ID NO: 173 - protein, 333 aa, Artemisia tridentata
MDTKPSPTLSLPWKTRILLTIITTVSDAVVRKNGTINRRLLNFLDFKAPPTPKSLKGVTSHDIILDKTRNLWYRVFIPTKHANEPLPVIMFYHGGGFVFLSPDVLAYDAVCRRFARKGPAIVVSVNYRLAPEHKYPAQHDDCFDVLKFLDDDLDMSKSMLPKNADLSRVFVVGDSAGGNLAHHVAYRACGFDFKRLKVAGVVAIQPFFGGEERTDSELRLEGTPIVSVKRTDWTWKAFLPQGEGFNRDHPIVNVSGPNAMDISKIDFPPTMVVVAGFDALHDWQKRYYEWLKKSGKEAYLFEYPNMCHAFYIFPELPEGAQLIGQICEFIRKY

SEQ ID NO: 174 - DNA, 1264 bp, Artemisia tridentata
gatggatgcattacccaaaactcccacatctctcgccttgccatggaaaacccgaattttaatttcgcttttctcctccctaacagacatagttagacgtaaagacggtacaataaaccgccgtctcctcagtttcctagactttcgtatcccaccaacttccaaacctatcaacggtgtcaagacacacgatgtggtcgtggatccagctcgtaagctatggttccgtgtatttgtccccacagaagaaaacgctatagaagatttccccgtgatcgtgttctttcacgggggaggattcgtctaccctggtgctgatggaaaagcctacgatgatgtgtgtcgaaaatttgctagaaaagtgccagcagtaattatttctgtggaataccgtctagcaccggagcataagtaccctgcacaacatgatgattgttttgatgtgttgaaatttcttgatgatgatgatgagagtaggttgaaatggttacctgagaatgcgaatatttcacgatgctttatggcgggagatagtgctgggggaaacctagctcatcatgttgctcaaagagcatgcgaattcaacttcaaacagcttaaggttattggcgtggtggcgattcaaccattctttggtggggaggagcgaacaaattctgaaattaaactaaaaaatgcgcctatagtgtcaccaaagcggacagattggtattggaaggcgttcatgccgccaggtgaaggctataatcgtgatcatccaatcatcaatgctagtgggccgaatgcagtggacatatcaaaattggattttccagcaacactggtagtggtagctgggtttgatgccctacaagactggcagaaaaggtactatgagtggttgaagaagtctggcaaagaagcatacttggtggaatatccaaatatgtgtcacgcattctacctattcctagaattgcctgaatccgagcaagttatgtctgaagtgaaagactttattcataaggtcttagagagggtttagaaggtttatcggatgacaaagaaaatcggcatcaacccgttctagcccagaacgtgtttccatattcttcatcactatttaacacatgtacgctaaattttggcatttttaccaatcattgaatttgttgctgagatttccatattagaaaaaacacaacatgttcaatcgattatggaattttcaagtctaatatcatcaatgttgtattacatatcgaaaaaaaaaaaaaaaaaaaaa

SEQ ID NO: 175 - protein, 340 aa, Artemisia tridentata
MDALPKTPTSLALPWKTRILISLFSSLTDIVRRKDGTINRRLLSFLDFRIPPTSKPINGVKTHDVVVDPARKLWFRVFVPTEENAIEDFPVIVFFHGGGFVYPGADGKAYDDVCRKFARKVPAVIISVEYRLAPEHKYPAQHDDCFDVLKFLDDDDESRLKWLPENANISRCFMAGDSAGGNLAHHVAQRACEFNFKQLKVIGVVAIQPFFGGEERTNSEIKLKNAPIVSPKRTDWYWKAFMPPGEGYNRDHPIINASGPNAVDISKLDFPATLVVVAGFDALQDWQKRYYEWLKKSGKEAYLVEYPNMCHAFYLFLELPESEQVMSEVKDFIHKVLERV

SEQ ID NO: 176 - DNA, 1285 bp, Artemisia tridentata
gaccactctttcacattagttttccctacatggatgcattgcccaaaactcccacatctctcgccttgccatggaaagcccgaattctaatttcgcttttctcctccctaacagacatagttagacgtaaagacggtacaataaaccgccgtctcctcagtttcctagactttcggatcccaccaacttccaaacctatcaacggtgtcaagacacacgatgtggtcgtggatccagctcgtaagctatggttccgtgtatttgtccccacagaagaaaacgctatagaagatttccccgtgatcgtgttctttcacgggggaggattcgtctaccctggtgctgatggaaaggcctacgatgatgtgtgtcgaaaatttgctagaaaagtgccagcagtaattatttctgtggaataccgtctagcaccggagcataagtaccctgcacaacatgatgattgttttgatgtgttgaaatttcttgatgatgatgatgagagtaggttgaaatggttacctgagaatgcgaatatttcacgatgctttatggcgggagatagtgctgggggaaacctagctcatcatgttgctcaaagagcatgcgaattcaacttcaaacagcttaaggttattggcgtggtggcgattcaaccattctttggtggggaggagcgaacaaattctgaaattgaactaaaaaatgcacctatagtgtcaccaaagcggacagattggtattggaaggcgttcatgccgccaggtgaaggctataatcgtgatcatccaatcatcaatgttagtgggccgaatgcactggacatatcaaaattggattttccagcaacactggtagtagcagctgggtttgatgccctacaagactggcagaaaaggtactatgagtggttgaagaagtctggcaaagaagcatacttggtggaatatccaaatatgtgtcacgcattctacctattcctagaattgcctgaatccgagcaagttatgtctgaagtgaaagactttattcataaggtcttagagagggtttagaaggtttatcggatgacaaagaaaatcggcatcaacccgttctagcctagaacgtgtttccatattcttcatcactatttaacgcatgtacgctaaattttggcatttttaccaatcattgaatttgttgctgagatttccatattagaaaaaacacaacatgttcaatcgattatggaattttcaagtctaatatcatcaatgttgtattacgaaaagaaaaaaaaaaaaaa

SEQ ID NO: 177 - protein, 340 aa, Artemisia tridentata
MDALPKTPTSLALPWKARILISLFSSLTDIVRRKDGTINRRLLSFLDFRIPPTSKPINGVKTHDVVVDPARKLWFRVFVPTEENAIEDFPVIVFFHGGGFVYPGADGKAYDDVCRKFARKVPAVIISVEYRLAPEHKYPAQHDDCFDVLKFLDDDDESRLKWLPENANISRCFMAGDSAGGNLAHHVAQRACEFNFKQLKVIGVVAIQPFFGGEERTNSEIELKNAPIVSPKRTDWYWKAFMPPGEGYNRDHPIINVSGPNALDISKLDFPATLVVAAGFDALQDWQKRYYEWLKKSGKEAYLVEYPNMCHAFYLFLELPESEQVMSEVKDFIHKVLERV

SEQ ID NO: 178 - DNA, 1167 bp, Artemisia tridentata
gatgtgtaaactttgattctttttccatggaggctcatactaaaactccgacatctctatctttaccatggaaaacacgaatatttctttcagcaatcaccaccgcatttgaactagttagacgaagagacggcacagttaatcgccgtctcttcaatctcatagacttccggatcccgccctcgtccaaaccaatcaacggtgtcaagacacacgatgtggtcgtggatccaactcgtaagctatggtttcgcgtattcactcccactcagcatgctgtacaagacctcccagttgtagtgttctttcacgggggtggattcattttcctcaacgctaatgtgaaggtttatgatgacgtgtgccgtaggttcgcaagagaattgcctgccatagtggtttctgtagactatcgccttgcacctgagcatcgataccctgcgcagcataatgattgctttgatgtgttgaagtttttggatgatgatgagaataggtcgaaatggttaccccataatgtgaatatttcacggagctttatggctggagatagtgctggggcaaacctagctcatcatgttgctcaaagagcttgtgaatttaagttcaataaactcaaggtaattggtgttgtggcgattcaacctttttttggtggagaggagcgaacgatttctgagatagagctcgaagggacacctgttgtgtccacgaatattacagattggtattggaatgctttcttgcccccaggtgaaggccacaatcgtgaccatccaattatcaacgttagcggcccaaaggcagtgaacatagcaaatatcaattttccacctacgatggtggtcgtggctgggttcgatgttctacgagactggcagaaaaggtactacgagtggctaaaaaagtccgggaaagaagcatacttgatggaatatccaaacatgtgtcattctttctacctttttcccgagttgcctgaatctgggaaacttattttggaagtgagggaattcattcaaaatgtcttaaaaaaaggtatgctctagtacatatcaatgaactagttgaacatatatatgtcgtaaacgacagattgtatacatccgtttttcgagttcataattaaataactagtttgttgtgtatcgaaaaaaaaaaaaaaaa

SEQ ID NO: 179 - protein, 340 aa, Artemisia tridentata
MEAHTKTPTSLSLPWKTRIFLSAITTAFELVRRRDGTVNRRLFNLIDFRIPPSSKPINGVKTHDVVVDPTRKLWFRVFTPTQHAVQDLPVVVFFHGGGFIFLNANVKVYDDVCRRFARELPAIVVSVDYRLAPEHRYPAQHNDCFDVLKFLDDDENRSKWLPHNVNISRSFMAGDSAGANLAHHVAQRACEFKFNKLKVIGVVAIQPFFGGEERTISEIELEGTPVVSTNITDWYWNAFLPPGEGHNRDHPIINVSGPKAVNIANINFPPTMVVVAGFDVLRDWQKRYYEWLKKSGKEAYLMEYPNMCHSFYLFPELPESGKLILEVREFIQNVLKKGML

SEQ ID NO: 180 - DNA, 1181 bp, Artemisia tridentata
gactctttaatataatatggacactaaaccatctccaaccctctccttaccatggaaaacccgcattttactcaccatcattaccacggtatccgacgccgtaatccgtaaaaacggcaccataaatcgtcgtctcctcaatttcctggacttcaaagcaccccccaccccaaaatccctgaaaagtgtaacatcacacgacataatattagacaagacgcgaaacctttggtatcgcgtcttcatacccacgaaacatgcaaatgagccacttccagtgattatgttttatcacggaggtggctttgtattcctatcgccagatgtcctcgcgtacgatgcagtatgcagacgtttcgcgaagacaggaccagcgatagttgtttctgttaattataggcttgcgccggagcacaagtatccggcgcagcatgatgattgttttgacgtgttgaagtttttagatgacgatttggatatgagtaaaagtatgttaccgaaaaatgcggatttgagtagggttttcgttgttggtgatagtgcgggtgggaatttagctcatcatgttgcttatagagcttgtggatttgatttcaagcgacttaaggtagctggagtggtagcaattcaaccattctttggcggtgaagaacggacagattccgagttgagactcgaagggacgccaatagtttcagtgaaacgaaccgattggacatggaaggcttttttgccacaaggagaagggttcaatcgcgatcatccaattgtcaatgttagcggacccaatgcaatggacatatccaaaatagactttccgccaacaatggttgttgttgctggttttgacgctctacacgactggcaaaaacggtactatgaatggctgaagaaatctggaaaagaagcatacttgtttgaataccctaatatgtgtcatgccttctatatcttcccggaattaccagaagctgcacaactaattggccagatatgcgagttcattcgcaagtattgaacaatgttggcacctgattaacaagtatgtaacttggttaataacttgtttttatttctcgtgtattaaagttgtaccagacatattttctttggtacatttttgtctacttggtatgaatttggtgtttgaacctcgaggttctaaaaaaaaaaaaaaaaaa

SEQ ID NO: 181 - protein, 333 aa, Artemisia tridentata
MDTKPSPTLSLPWKTRILLTIITTVSDAVIRKNGTINRRLLNFLDFKAPPTPKSLKSVTSHDIILDKTRNLWYRVFIPTKHANEPLPVIMFYHGGGFVFLSPDVLAYDAVCRRFAKTGPAIVVSVNYRLAPEHKYPAQHDDCFDVLKFLDDDLDMSKSMLPKNADLSRVFVVGDSAGGNLAHHVAYRACGFDFKRLKVAGVVAIQPFFGGEERTDSELRLEGTPIVSVKRTDWTWKAFLPQGEGFNRDHPIVNVSGPNAMDISKIDFPPTMVVVAGFDALHDWQKRYYEWLKKSGKEAYLFEYPNMCHAFYIFPELPEAAQLIGQICEFIRKY

SEQ ID NO: 182 - DNA, 1180 bp, Artemisia tridentata
gtcatgtgtaaactttgattctttttccatggaggctcatactaaaactccgacatctctatctttaccatggaaaacacgaatatttctttcagcaatcacgaccgcatttgaactagttagacgaagagacggcacagttaatcgccgtctcttcaatctcatagacttccggatcccgccctcgtccaaaccaatcaacggtgtcaagacgcacgatgtggtcgtggatccaactcgtaagctatggtttcgcgtattcactcccactcagcatgctgtacgagacctcccagttgtagtgttctttcacgggggtggattcattttcctcaacgctaatgtgaaggtttatgatgacgtgtgccgtaggttagcaagagaattgcctgccatagtggtttctgtagactatcgccttgcacctgagcatcgataccctacgcagcataatgattgctttgatgtgttgaagtttttggatgatgatgagaataggtcgaaatggttaccccataatttgaatatttcacggagctttatggctggagatagtgctggggcaaacctagctcatcatgttgctcaaagagcttgtgaatttaagttcaataaactcaaggtaattggtgttgtggcgattcaacctttttttggcggagaggagcgaacgatttctgagatagagctcgaagggacacctgttgtgtccacgaatattacagattggtattggaacgctttcttgcccccaggtgaaggccacaatcgtgaccatccaattatcgacgttagcggcccaaaggcagtggacatagcaaatatcaattttccacctacaatggtggtcgtggctgggttcgatgttctacgagactggcagaaaaggtactacgagtggctaaaaaagtccgggaaagaagcatacttgatggaatatccaaacatgtgtcattctttctacctttttcccgagttgcctgaatctgggaaacttattttggaagtgagggaattcattcaaaatgtcttaaaaaaaggtatgctctagtacatatcaatgaactagttgaacatatatatgtcttaaacgacagattgtatacatccgtttttcgagttcataattaaataactagtttgttgtgtatcggataaaacgaaaaaaaaaaaaaaaaaa

SEQ ID NO: 183 - protein, 340 aa, Artemisia tridentata
MEAHTKTPTSLSLPWKTRIFLSAITTAFELVRRRDGTVNRRLFNLIDFRIPPSSKPINGVKTHDVVVDPTRKLWFRVFTPTQHAVRDLPVVVFFHGGGFIFLNANVKVYDDVCRRLARELPAIVVSVDYRLAPEHRYPTQHNDCFDVLKFLDDDENRSKWLPHNLNISRSFMAGDSAGANLAHHVAQRACEFKFNKLKVIGVVAIQPFFGGEERTISEIELEGTPVVSTNITDWYWNAFLPPGEGHNRDHPIIDVSGPKAVDIANINFPPTMVVVAGFDVLRDWQKRYYEWLKKSGKEAYLMEYPNMCHSFYLFPELPESGKLILEVREFIQNVLKKGML

SEQ ID NO: 184 - DNA, 1346 bp, Artemisia tridentata
gacttctccatgtcacatttatcaaagttatttctgtaaattttcccaccatggacgaagttgcacccaaaactcagacatcgctctccttaccatggagaacacgattacatctttcagctatttctgcagtaaccgacgcagctcgtcgacatgacggcaccgtgaaccgacgtctccttagtttcgtagactttgtcgatcgagtccctcctaatcccgaaccaattaacggtgtcaagacatacgatgtagttgtggatccagctcgtaagctatggttccgagtgttcgtccccacagaagaaagcgctatagaagaactccgagtaatgatatactttcatggtgggggattcgttttcttcaacactgatacaaaactctacgatggcgtatgtcgacgatttgctaaaaagttgaatgctattgttgtttctgtggactatcgtcatgcacccgagcataagtaccctgctcaacatgacgattgttttgatgtgttgaaatttcttgacaatgatgagaataggtccaaatggttacctgaaaatgcgaatatttcacggtgctttttggctggagatagcgctggtggaaacctagctcatcatgttgctctaagaacgtgtgaattgaacttccaacaacttaagatcgttggcttggtgttaattcaaccattctttggaggagaggagcgaacaaattctgaaaaggaactcgaaggaacacctctcttgtcaatgaagcggacagattggctctggaaagcgttcatgccagtaggtgaaggctataaccgtgaccatcaaatcgtaaacgttagcggcccaaacgcagtggacatatcgaaaatgcattttccaccaaccatattgattacggctggatttgatattttaagggactggaataaaaggcactatgagtggctgaagaagtccgggaaagaagtatacttggtggattacccaaacatgttccacatttttcacgcctacccggagttgcctgaatctgaccaacttatgtcagtaataaaggactttattaacagtgtctcaattaaggtttagaagacccgtaagaagcttaataagatggaaatgaaaattgtcttcaagccttcacgcggcaagactgtgaattgataattttcgctttgcatcaatcagacacttgtgtttcaacttaaattacagtgttattcaatcaacaagtatgcatcgatcgttcttgttctgaacattatatatattatcaagatatatgtacgtagaaacctttgagatgtaaaactcttttttaaaaggaaacaatttgagacgaaaaaaaaaaaaaaa

SEQ ID NO: 185 - protein, 342 aa, Artemisia tridentata
MDEVAPKTQTSLSLPWRTRLHLSAISAVTDAARRHDGTVNRRLLSFVDFVDRVPPNPEPINGVKTYDVVVDPARKLWFRVFVPTEESAIEELRVMIYFHGGGFVFFNTDTKLYDGVCRRFAKKLNAIVVSVDYRHAPEHKYPAQHDDCFDVLKFLDNDENRSKWLPENANISRCFLAGDSAGGNLAHHVALRTCELNFQQLKIVGLVLIQPFFGGEERTNSEKELEGTPLLSMKRTDWLWKAFMPVGEGYNRDHQIVNVSGPNAVDISKMHFPPTILITAGFDILRDWNKRHYEWLKKSGKEVYLVDYPNMFHIFHAYPELPESDQLMSVIKDFINSVSIKV

SEQ ID NO: 186 - DNA, 1438 bp, Artemisia tridentata
ggaatataaaatcattataaaacgaggatagttggtgctcaccaaaaatagtaaattcataccaaaaatctacccactcgagtattgtacccactactttttttcttttgaaaaacaatctacccacttaactagctactcgtgttatatcaaaaggcaccactctttcacattagttttccctacatggatgcattacccaaaactcccacatctctcgccttgccatggaaaacccgaattctaatttcgcttttctcctccctaacagacatagttagacgtaaagacggtacaataaaccgccgtctcctcagtttcctagactttcagatcccaccaacttccaaacctatcaacggtgtcaagacacacgatgtggtcgtggatccagctcgtaagctatggttccgtgtatttgtccccacagaagaaaacgctatagaagatttccccgtgatcgtgttctttcacggggggggattcgtccaccctggtgctgatggaaaagcctacgatgatgtgtgtcgaaaatttgctagaaaagtgccagcagtaattatttctgtggaataccgtctagcaccggagcataagtaccctgcacaacatgatgattgttttgatgtgttgaaatttcttgatgatgatgagagtaggttgaaatggttacctgagaatgcgaatatttcacgatgctttatggcgagagatagtgctgggggaaacctagctcatcatgttgctcaaagagcatgcgaattcaacttcaaacagcttaaggttattggcgtggtggcgattcaaccattctttggtggggaggagcgaacaaattctgaaattgaactaaaaaatgcacctatagtgtcaccaaagcggacagattggtattggaaggtgttcatgccgccaggtgaaggctataatcgtgatcatccaatcatcaatgttagtgggccgaatgcactggacatatcaaaattggattttccagcaacactggtagtagtagctgggtttgatgccctacaagactggcagaaaaggtactatgagtggttgaagaagtctggcaaagaagcatacttggtggaatatccaaatatgtgtcacgcattctacctattcctagaattgcctgaatccgagcaagttatgtctgaagtgaaagactttattcataaggtcttagagagggtttagaaggtttatcggatgacaaagaaaatcggcatcaacccgttctagcctagaacgtgtttccatattcttcatcactatttaacacatgtacgctaaattttggcatttttaccaatcattgaatttgctgctgagatttccatattagaaaaaacacaacatgttcaatcgattatggaattttcaagtctaatatcatcaatgttgtaccaaaaaaaaaaaaaaaaaaaaa

SEQ ID NO: 187 - protein, 339 aa, Artemisia tridentata
MDALPKTPTSLALPWKTRILISLFSSLTDIVRRKDGTINRRLLSFLDFQIPPTSKPINGVKTHDVVVDPARKLWFRVFVPTEENAIEDFPVIVFFHGGGFVHPGADGKAYDDVCRKFARKVPAVIISVEYRLAPEHKYPAQHDDCFDVLKFLDDDESRLKWLPENANISRCFMARDSAGGNLAHHVAQRACEFNFKQLKVIGVVAIQPFFGGEERTNSEIELKNAPIVSPKRTDWYWKVFMPPGEGYNRDHPIINVSGPNALDISKLDFPATLVVVAGFDALQDWQKRYYEWLKKSGKEAYLVEYPNMCHAFYLFLELPESEQVMSEVKDFIHKVLERV

SEQ ID NO: 188 - DNA, 1083 bp, Artemisia tridentata
ggaccttcattgaacacaaatgggttctcttccttatgttgtggaagacttgaatggctttgttcaaatctatagtgacggttctattcatcgtcacgataaccttgacttaactgcttttccagtaaaagacgacggttcagtagattataaagattattgttatgacaaactccacaacctccacctccgcctttataaacccaaatccgccaccaccaaggccaagctttcggtcatgtacttccttcatggtggtggcttttgtggtggctcatttgcatggccaaatttccacaattgttgcctcagaatctcatccgccctacatgccattgtagtggcaccagactatcgtcttgcaccagagcataggctcccggctgctatagacgactcgttaggtgccttaaagtggctccaggagttagctagaaaccctaaatatgatgtggttaattgttttgattttaacaagtttttcataataggagactcttctggtgggaatattgcacaccacctggctatacggttaggacctggctcgcccgaattagcgcctattaagatacgaggttacgtgatgcttgctccgttttttggcggaaaagagaggacaaagtcggaggcccaaggacagccagaaaaaatgttaaacattgaccttcttgatacgttatggagaatgtcattaccagctgggagcacgctcgatcacccctttgcgaacccattcgggccaaaaagtgcaagccttgagaaaattaaactcgaccccatactcttaatggttgggggagatgaaataatgaaagatagggtgaaactgtatgcgaagaggttaaaagagcttggaaaggtagcacgttgctttgaattcaaaggcaaacaacacggtttcttcaccaatgagcctcactcagatgtttccaattcagtattgaacctaatcaaggatttcatgtttaaacattctagataattgatttggagtacatataggttaactttcatgtattgagtttaatgtttttgaatgtaatataaactttttatatcgaaaaaaaaaaaaaaaaaaaa

SEQ ID NO: 189 - protein, 321 aa, Artemisia tridentata
MGSLPYVVEDLNGFVQIYSDGSIHRHDNLDLTAFPVKDDGSVDYKDYCYDKLHNLHLRLYKPKSATTKAKLSVMYFLHGGGFCGGSFAWPNFHNCCLRISSALHAIVVAPDYRLAPEHRLPAAIDDSLGALKWLQELARNPKYDVVNCFDFNKFFIIGDSSGGNIAHHLAIRLGPGSPELAPIKIRGYVMLAPFFGGKERTKSEAQGQPEKMLNIDLLDTLWRMSLPAGSTLDHPFANPFGPKSASLEKIKLDPILLMVGGDEIMKDRVKLYAKRLKELGKVARCFEFKGKQHGFFTNEPHSDVSNSVLNLIKDFMFKHSR

SEQ ID NO: 190 - DNA, 1210 bp, Artemisia tridentata
gatatcataccttgattaaacacaaaatgggttctcttcctcatgttgtggaagattgttatggccttctccaactctatagtgacggttctattcaccgcgaaaagaacattgacttaactgctttttcagtaaaagacgatggttctatacaatataaggattattgttatgacaaactaaacgacctccatttacgcctctataaacccaaatcagctacctctacgaccaaattacccgttgtttactttctccatggtggtggattttgtttcgggtcatttgcatggccaaatttccataattgttgccttagaatcgcctcggcccttcatgtcaatgttgtggcgcctgaccatcgtcttgcacccgagcataggctcccggctgctatagacgattcgtttggtgctttgaagtggctccaagagctagctagaaaccctaaaaatgatgtggttgatttttttgactttgacaaggttttcataatagctgactcttgtggtgggactattgcacaccacttggcagtacgtttgggacctggctcacccgagctagcgcctatcaagatacgagggtacgtgatgctggcgccattctttggcggaacagagaggacgaaatcagaggcagaaggattgcccgaaaaggtgttaacgatggatgtgcttgatacattctggagaatgtcattaccaattggagagacacttgatcacccaattgcaaacccatttgggccaaaaagcccaagtcttgagcaagttaatcttgatccaatactcttaattgttggaaaggatgaacttatgaaagatagggttaaattatatgctaataggttaaaagagcttggaaagatagccaattatgttgaatttgaaggcaaacaacacgggttcttcacaaatgagccttactcggatgtttcagagccggttttgaatttgatgaaggattttatgttccgacattctagttaacttgatttgggtcaagttaataagctttcattatcaccctagatgttgtttgatcgattcagcataaagttttgtattgtataatgtagtcgatctttttgtatgagtctgtgaaatatctttgtgcttactcgttgatatataacgagtagcttatatttgagtgtgttttcttgattaagcgtatgactaatattacctaaaaaaaaaaaaaaaaa

SEQ ID NO: 191 - protein, 321 aa, Artemisia tridentata
MGSLPHVVEDCYGLLQLYSDGSIHREKNIDLTAFSVKDDGSIQYKDYCYDKLNDLHLRLYKPKSATSTTKLPVVYFLHGGGFCFGSFAWPNFHNCCLRIASALHVNVVAPDHRLAPEHRLPAAIDDSFGALKWLQELARNPKNDVVDFFDFDKVFIIADSCGGTIAHHLAVRLGPGSPELAPIKIRGYVMLAPFFGGTERTKSEAEGLPEKVLTMDVLDTFWRMSLPIGETLDHPIANPFGPKSPSLEQVNLDPILLIVGKDELMKDRVKLYANRLKELGKIANYVEFEGKQHGFFTNEPYSDVSEPVLNLMKDFMFRHSS

SEQ ID NO: 192 - DNA, 1116 bp, Artemisia tridentata
gggatatcataccttgattaaacacaaaatgggttctcttcctcacgttgtggaagattgttatggccttctccaactctatagtgacggttctattcaccgcgaaaagaacattgacttaactgctttttcagtaaaagacgatggttctatacaatataaagattattgttatgacaaactaaacgacctccatttacgcctctataaacccaaatcagctacctctacgaccaaattacctgttgtttactttctccatggtggtggattttgtttcgggtcatttgcatggccaaatttccataattgttgccttagaatcgcttcggcccttcatgtcaatgttgtggcgcctgaccatcgtcttgcacccgagcataggctcccggctgctatagacgattcgtttggtgctttgaagtggctccaagagctagctagaaaccctaaaaatgatgtggttgatttttttgactttgacaaggttttcataatagctgactcttgtggtgggactattgcacaccacttggcagtacgtttgggacctggctcacccgagctagcgcctatcaagatacgagggtacgtgatgctggcgccattctttggcggaacagagaggacgaaatcagaggcagaaggattgcccgaaaaggtgttaacgatggatgtgcttgatacattctggagaatgtcattaccaattggagagacacttgatcacccaattgcaaatccatttgggccaaaaagcccaagtcttgagcaagttaatcttgatccaatactcttaatggttggaaaggatgaacttatgaaagatagggttaaattatatgctaataggttaaaagagcttggaaagatagccaattatgttgaatttgaaggcaaacaacacgggttcttcacaaatgagccttactcggatgtttcagagccggttttgaatttgatgaaggattttatgttccgacattctagttaacttgatttgggtcaagttaataagctttcattatcaccctagatgttgtttgatcgattcagcataaagttttgtattgtataatgtagtcgatctttttgtacgaaaaaaaaaaaaaaaaa

SEQ ID NO: 193 - protein, 321 aa, Artemisia tridentata
MGSLPHVVEDCYGLLQLYSDGSIHREKNIDLTAFSVKDDGSIQYKDYCYDKLNDLHLRLYKPKSATSTTKLPVVYFLHGGGFCFGSFAWPNFHNCCLRIASALHVNVVAPDHRLAPEHRLPAAIDDSFGALKWLQELARNPKNDVVDFFDFDKVFIIADSCGGTIAHHLAVRLGPGSPELAPIKIRGYVMLAPFFGGTERTKSEAEGLPEKVLTMDVLDTFWRMSLPIGETLDHPIANPFGPKSPSLEQVNLDPILLMVGKDELMKDRVKLYANRLKELGKIANYVEFEGKQHGFFTNEPYSDVSEPVLNLMKDFMFRHSS

SEQ ID NO: 194 - DNA, 1112 bp, Artemisia tridentata
ggttttcattctcacttggttttcttttaaagcaaatacacaacctccaggagtcttaacctaacacctatggcacctcacgaggttgacgactgtagaggtgtgctaaaagtttacagtgatggttcaatatggcggtccactgaaccgagcttttcagtccctgtggttgatgatggctcggttctttggaaagatgtcatgtttgatcagcccaacaatcattaccttcgtctttacaagccagctaatgtggtgggaaaaaaactgccagtcttttactacatccatggtggtggtttttgcattgggtcaagaacgtggcctaattgccaaaattattgttttaagttggcgtcggctctacaagctgtgattgtggctcctgactatcggttagcccccgagagccgtatgccattggcagttgacgatgggtttaattctgttaagtggcttcaggctcaagctgtggctgctgagcctgatccatggttggttgagtctgtggactttagtcgtgtttttatttctggtgattcggctggtgggaacattgctcataatgtggcagtgaagttaggggctggttcaaagagtcttgaaccggtttgtgtgagggggtacgtgttattggcaccgttctttggtgggatgcaactgaccgattttgaggctaatggtcccaaagacgcattcttgaactgggaacttattgacaggttttggaggctatcgattccggaaggggacacgatggaccaccctttggtgaacccattcggaccggctagcttggacctaaaaccactagagttagacccaatattggttgtttgtggcgcttgtgatctactaagagacagagcaaaagactatgcagataaactaaagagttgtggtaaggatgtggtttatgaagaatttgaaggtcaacaacatgggttctttactattaatccaaattcagaaccatctattaagttgatgcaaattatcaaagatttcatcactaagtattctgtttagacatttggggtctttattttgtgcggtggaaatatgtcttaataaatttggagaaataatatttatttgtgcgaaaaaaaaaa

SEQ ID NO: 195 - protein, 319 aa, Artemisia tridentata
MAPHEVDDCRGVLKVYSDGSIWRSTEPSFSVPVVDDGSVLWKDVMFDQPNNHYLRLYKPANVVGKKLPVFYYIHGGGFCIGSRTWPNCQNYCFKLASALQAVIVAPDYRLAPESRMPLAVDDGFNSVKWLQAQAVAAEPDPWLVESVDFSRVFISGDSAGGNIAHNVAVKLGAGSKSLEPVCVRGYVLLAPFFGGMQLTDFEANGPKDAFLNWELIDRFWRLSIPEGDTMDHPLVNPFGPASLDLKPLELDPILVVCGACDLLRDRAKDYADKLKSCGKDVVYEEFEGQQHGFFTINPNSEPSIKLMQIIKDFITKYSV

SEQ ID NO: 196 - DNA, 1188 bp, Artemisia tridentata
  misc_feature (917)..(917): n is a, c, g, or t
  misc_feature (1119)..(1119): n is a, c, g, or t
  misc_feature (1166)..(1167): n is a, c, g, or t
  misc_feature (1169)..(1171): n is a, c, g, or t
  misc_feature (1173)..(1174): n is a, c, g, or t
gatatcataccttgattaaacacaaaatgggttctcttcctcacgttgtggaagattgttatggccttctccaactctatagtgacggttctattcaccgcgaaaagaacattgacttaactgctttttcagtaaaagacgatggttctatacaatataaagattattgttatgacaaactaaacgacctccatttacgcttctataaacccaaatcagctacctctacgaccaaattacctgttgtttactttctccatggtggtggattttgtttcgggtcatttgcatggccaaatttccataattgttgccttagaatcgcctcggcccttcatgtcaatgttgtggcgcctgaccatcgtcttgcacccgagcataggctcccggctgctatagacgattcgtttggtgctttgaagtggctccaagagctagttagaaaccctaaaaatgatgtggttgatttttttgactttgacaaggttttcataatagctgactcttgtggtgggactattgcacaccacttggcagtacgtttgggacctggctcacccgagctagcgcctatcaagatacgagggtacgtgatgctggcgccattctttggcggaacagagaggacgaaatcagaggcagaaggattgcccgaaaaggtgttaacgatggatgtgcttgatacattctggagaatgtcattaccaattggagagacacttgatcacccaattgcaaacccatttgggccaaaaagcccaagtcttgagcaagttaatcttgatccaatactcttaattgttggaaaggatgaacttatgaaagatagggttaaattatatgctaataggttaaaagagcttggaaagatagccaattatgttgaatttgaaggcaaacaacacgggttcttcacnaatgagccttactcggatgtttcagagccggttttgaatttgatgaaggattttatgttccgacattctagttaacttgatttgggtcaagttaataagctttcattatcaccctagatgttgtttgatcgattcagcataaagttttgtattgtataatgtagtcgatctttttgtatgagtctgtgaaatatctttgtgnttactcgttgatatataacgagtagcttatatttgagtgtgttttcnnannnanntaaaaaaaaaaaaa

SEQ ID NO: 197 - protein, 321 aa, Artemisia tridentata
  misc_feature (297)..(297): Xaa can be any naturally occurring amino acid
MGSLPHVVEDCYGLLQLYSDGSIHREKNIDLTAFSVKDDGSIQYKDYCYDKLNDLHLRFYKPKSATSTTKLPVVYFLHGGGFCFGSFAWPNFHNCCLRIASALHVNVVAPDHRLAPEHRLPAAIDDSFGALKWLQELVRNPKNDVVDFFDFDKVFIIADSCGGTIAHHLAVRLGPGSPELAPIKIRGYVMLAPFFGGTERTKSEAEGLPEKVLTMDVLDTFWRMSLPIGETLDHPIANPFGPKSPSLEQVNLDPILLIVGKDELMKDRVKLYANRLKELGKIANYVEFEGKQHGFFXNEPYSDVSEPVLNLMKDFMFRHSS

SEQ ID NO: 198 - DNA, 1213 bp, Artemisia tridentata
  misc_feature (1168)..(1169): n is a, c, g, or t
  misc_feature (1173)..(1173): n is a, c, g, or t
  misc_feature (1175)..(1177): n is a, c, g, or t
  misc_feature (1179)..(1180): n is a, c, g, or t
  misc_feature (1182)..(1183): n is a, c, g, or t
  misc_feature (1186)..(1186): n is a, c, g, or t
  misc_feature (1188)..(1188): n is a, c, g, or t
gatatcataccttgattaaacacaaaatgggttctcttcctcatgttgtggaagattgttatggccttctccaactctatagtgacggttctattcaccgcgaaaagaacattgacctaactgctttttcagtaaaagacgatggttctatacaatataaggattattgttatgacaaactaaacgacctccatttacgcctctataaacccaaatcagctacctctacgaccaaattacccgttgtttactttctccatggtggtggattttgtttcgggtcatttgcatggccaaatttccataattgttgccttagaatcgcctcggcccttcatgtcaatgttgtggcgcctgaccatcgtcttgcacccgagcataggctcccggctgctatagacgattcgtttggtgctttgaagtggctccaagagctagttagaaaccctaaaaatgatgtggttgatttttttgactttgacaaggttttcataatagctgactcttgtggtgggactattgcacaccacttggcagtacgtttgggacctggctcacccgagctagcgcctatcaagatacgagggtacgtgatgctggcgccattctttggcggaacagagaggacgaaatcagaggcagaaggattgcccgaaaaggtgttaacgatggatgtgcttgatacattctggagaatgtcattaccaattggagagacacttgatcacccaattgcaaacccatttgggccaaaaagcccaagtcttgagcaagttaatcttgatccaatactcttaattgttggaaaggatgaacttatgaaagatagggttaaattatatgctaataggttaaaagagcttggaaagatagccaattatgttgaatttgaaggcaaacaacacgggttcttcacgaatgagccttactcggatgtttcagagccggttttgaatttgatgaaggattttatgttccgacattctagttaacttgatttgggtcaagttaataagctttcattatcaccctagatgttgtttgatcgattcagcataaagttttgtattgtataatgtagtcgatctttttgtatgagtctgtgaaatatctttgtgtttactcgttgatatataacgagtagcttatatttgagtgtgttttcttnnttangnnnannannaanantaccaaaaaaaaaaaaaaaaaaaaa

SEQ ID NO: 199 - protein, 321 aa, Artemisia tridentata
MGSLPHVVEDCYGLLQLYSDGSIHREKNIDLTAFSVKDDGSIQYKDYCYDKLNDLHLRLYKPKSATSTTKLPVVYFLHGGGFCFGSFAWPNFHNCCLRIASALHVNVVAPDHRLAPEHRLPAAIDDSFGALKWLQELVRNPKNDVVDFFDFDKVFIIADSCGGTIAHHLAVRLGPGSPELAPIKIRGYVMLAPFFGGTERTKSEAEGLPEKVLTMDVLDTFWRMSLPIGETLDHPIANPFGPKSPSLEQVNLDPILLIVGKDELMKDRVKLYANRLKELGKIANYVEFEGKQHGFFTNEPYSDVSEPVLNLMKDFMFRHSS

SEQ ID NO: 200 - DNA, 972 bp, Artemisia tridentata
gatatcataccttgattaaacacaaaatgggttctcttcctcatgttgtggaagattgttatggccttctccaactctatagtgacggttctattcaccgcgaaaagaacattgacttaactgctttttcagtaaaagacgatggttctatacaatataaggattattgttatgacaaactaaacgacctccatttacgcctctataaacccaaatcagctacctctacgaccaaattacccgttgtttactttctccatggtggtggattttgtttcgggtcatttgcatggccaaatttccataattgttgccttaggatcgcctcggcccttcatgtcaatgttgtagcgcctatcaagatacgagggtacgtgatgctggcgccattctttggcggaacagagaggacgaaatcagaggcagaaggattgcccgaaaaggtgttaacgatggatgtgcttgatacattctggagaatgtcattaccaattggagagacacttgatcacccaattgcaaacccatttgggccaaaaagcccaagtcttgagcaagttaatcttgatccaatactcttaattgttggaaaggatgaacttatgaaagatagggttaaattatatgctaataggttaaaagagcttggaaagatagccaattatgttgaatttgaaggcaaacaacacgggttcttcacaaatgagccttactcggatgtttcagagccggttttgaatttgatgaaggattttatgttccgacattctagttaacttgatttgggtcaagttaataagctttcattatcaccctagatgttgtttgatcgattcagcataaagttttgtattgtataatgtagtcgatctttttgtatgagtctgtgaaatatctttgtgcttactcgttgatatataacgagtagcttatatttgagtgtgttttcttggctaaaaaaaaaaaaaaaaa

SEQ ID NO: 201 - protein, 249 aa, Artemisia tridentata
MGSLPHVVEDCYGLLQLYSDGSIHREKNIDLTAFSVKDDGSIQYKDYCYDKLNDLHLRLYKPKSATSTTKLPVVYFLHGGGFCFGSFAWPNFHNCCLRIASALHVNVVAPIKIRGYVMLAPFFGGTERTKSEAEGLPEKVLTMDVLDTFWRMSLPIGETLDHPIANPFGPKSPSLEQVNLDPILLIVGKDELMKDRVKLYANRLKELGKIANYVEFEGKQHGFFTNEPYSDVSEPVLNLMKDFMFRHSS

SEQ ID NO: 202 - DNA, 1089 bp, Artemisia tridentata
gaaagcaaatacacaacctccaagagtcttaacctaacacctatggcacctcacgaggttgacgactgtagaggtgtgctaaaagtttacagtgatggttcaatatggcggtccactgaaccgagcttttcagtccctgtggttgatgatggctcggttctttggaaagatgtcatgtttgatcagcccaacaatcattaccttcgtctttacaagccagctaatgtggtgggaaaaaagctgccagtcttttactacatccatggtggtggtttttgcattgggtcaagaacatggcctaattgccaaaattattgttttaagttggcgtcggctctacaagctgtgattgtggctcctgactatcggttagcccctgagagccgtatgccattggcagttgacgatgggtttaattctgttaagtggcttcaggctcaagctgtggctgctgagcctgatccatggttggttgagtctgtggactttagtcgtgtttttatttctggtgattcggctggtgggaacattgctcataatgtggcggtgaggttaggggctggttcaaagagtcttgaaccggtttgtgtgagggggtacgtgttattggcaccgttctttggtgggatgcaactgaccgattttgaggctaatggtcccaaagacgcattcttgaactgggaacttatcgacaggttttggaggctatcgattcccgaaggggacacgatggaccaccctttggtgaacccattcggactggctagcttggaccttaaaccagtagagttagacccaatattggttgtttgtggtgcttgtgatctactaagagacagagcaaaagactatgcagataaactaaagagttgtggtaaggatgtggtttatgaagaatttgaaggtcaacaacatgggttctttactattaatccaaattcagaaccatctattaagttgatgcaaattatcaaagatttcatcactaagtattctgtttagacatttggggtctttattttgtgtggtgtaaatatgtcttaataaatttggagaaataatatttatttgtgcgaaaaaaaaaaaaaa

SEQ ID NO: 203 - protein, 319 aa, Artemisia tridentata
MAPHEVDDCRGVLKVYSDGSIWRSTEPSFSVPVVDDGSVLWKDVMFDQPNNHYLRLYKPANVVGKKLPVFYYIHGGGFCIGSRTWPNCQNYCFKLASALQAVIVAPDYRLAPESRMPLAVDDGFNSVKWLQAQAVAAEPDPWLVESVDFSRVFISGDSAGGNIAHNVAVRLGAGSKSLEPVCVRGYVLLAPFFGGMQLTDFEANGPKDAFLNWELIDRFWRLSIPEGDTMDHPLVNPFGLASLDLKPVELDPILVVCGACDLLRDRAKDYADKLKSCGKDVVYEEFEGQQHGFFTINPNSEPSIKLMQIIKDFITKYSV

SEQ ID NO: 204 - DNA, 1106 bp, Artemisia tridentata
gaccttcattgaacacaaatgggttctcttccttatgttgtggaagacttgaatggctttgttcaaatctatagtgacggttctattcatcgtcacgataaccttgacttaactgcttttccagtaaaagacgacggttcagtagattataaagattattgttatgacaaactccacaacctccacctccgcctttataaacccaaacccgccaccaccaaggccaagctttcggtcatgtacttccttcatggtggtggcttttgtggtggctcatttgcatggccaaatttccacaattgttgcctcagaatctcatccgccctacatgccattgtagtggcaccagactatcgtcttgcaccagagcataggctcccggctgctatagacgactcgttaggtgccttaaagtggctccaggagttagctagaaaccctaaatatgatgtggttaattgttttgattttaacaagtttttcataataggagattcttctggtgggaatattgcacaccacctggctatacggttaggacctggctcgcccgaattagcgcctattaagatacgaggttacgtgatgcttgctccgttttttggcggaaaagagaggacaaagtcggaggcccaaggacagccagaaaaaatgttaaacattgaccttcttgatacgttatggagaatggcattaccagctgggagcacgctcgatcacccctttgcgaacccattcgggccaaaaagtgcaagccttgagaaaattaaactcgaccccatactcttaatggttggaggagatgaaataatgaaagatagggtgaaactgtatgcgaagaggttaaaagagcttggaaaggtagcacgttgttttgaattcaaaggcaaacaacacggtttcttcaccaatgagcctcactcagatgtttccaattcagtattgaacctaatcaaggatttcatgtttaaacattctagataattgatttggagtacatataggttaactttcatgtattgagtttaatgtttttgaatgtaacataaactttttatatcatgtgaaaaatgttgtttttcttgttaaaaaaaaaaaaaaaaaaa

SEQ ID NO: 205 - protein, 321 aa, Artemisia tridentata
MGSLPYVVEDLNGFVQIYSDGSIHRHDNLDLTAFPVKDDGSVDYKDYCYDKLHNLHLRLYKPKPATTKAKLSVMYFLHGGGFCGGSFAWPNFHNCCLRISSALHAIVVAPDYRLAPEHRLPAAIDDSLGALKWLQELARNPKYDVVNCFDFNKFFIIGDSSGGNIAHHLAIRLGPGSPELAPIKIRGYVMLAPFFGGKERTKSEAQGQPEKMLNIDLLDTLWRMALPAGSTLDHPFANPFGPKSASLEKIKLDPILLMVGGDEIMKDRVKLYAKRLKELGKVARCFEFKGKQHGFFTNEPHSDVSNSVLNLIKDFMFKHSR

SEQ ID NO: 206 - DNA, 1097 bp, Artemisia tridentata
gcacatggatccatcatcatcatcggatcaaatcatcaaagaaatccccgaattcatcagagtctacaaagacggcagcttccttaaactcgggggcacagatgatgtctccgcgggccttgacccttccacgggcgttcaatctaaagatgtcgttatttcacacgaaacaaacgtttttgttaggatttatattcctgaaaaaaccagcaactcgaacataaagaaactcccacttttaatttactttcatggtggcggtttcataattgaaacagctgcctcacccacgtaccataacttccttaacctcgtatcatccaaatccaacgttgttgtagtgtccgtcgactataggacagcccctgagcatcctatcccgacttgttatgatgattcatgggaagcaatcaattgggtcgctcaacatgttaatggaaatggacctgatacgtggcttaacgagtatccggattttagtcgcgtgtttttcgggggagatagtgctggtggaaatattgcacatcatatgggtattcgggctgggacggggacttcgggtcgggttgtgaaccttgagggtgttattttgttacacccctttttttggggggaggaacggattggggtggagttgggtgagcacccgtggaaggaaaccgcgggtgaggtatggatgtttgcttatccaggaaccagcgggttagatgacccgctgattaacccggacaaagatccaaaagtgtcggatcttggatgctctagggtacttgtttgtgttgctgggaatgatataggaaaagatagaggattctattataaggatattttgggtaaaaatggatggaaaggtgacgttgaggttattgaggataaaggagaggatcatgtgtttttcttaatcaacccttcttgtgataatgcttcttccttgcgcaagagaatttctacttttattaatcaagtccagtcctaggacaagtcatggtacaacaagataacaaatgctctagcagtttaaattgtaacgatatgattgtgttatattattacatataaataaatcaatgttttcttatcgaaaaaaaaaaaaaaaa

SEQ ID NO: 207 - protein, 323 aa, Artemisia tridentata
MDPSSSSDQIIKEIPEFIRVYKDGSFLKLGGTDDVSAGLDPSTGVQSKDVVISHETNVFVRIYIPEKTSNSNIKKLPLLIYFHGGGFIIETAASPTYHNFLNLVSSKSNVVVVSVDYRTAPEHPIPTCYDDSWEAINWVAQHVNGNGPDTWLNEYPDFSRVFFGGDSAGGNIAHHMGIRAGTGTSGRVVNLEGVILLHPFFWGEERIGVELGEHPWKETAGEVWMFAYPGTSGLDDPLINPDKDPKVSDLGCSRVLVCVAGNDIGKDRGFYYKDILGKNGWKGDVEVIEDKGEDHVFFLINPSCDNASSLRKRISTFINQVQS

SEQ ID NO: 208 - DNA, 1037 bp, Artemisia tridentata
gaaaagaaaaatgtcttcatcgaccgaaaccgagaccacccatgatttcgcgccgtttttacgtgtatacaaagatggacgtgtcgaacgtttgctcaccacaccccgtttgccaccctccaccgaccctataaccggtgttcaatccaaagacgttgctatcgcacccgatatcgatgtgaaaacccgaatattcctccctaaaatggacgaactggatgcatccaaaaagcttcctctgatcatttatgtgcatggtggggggttttgtattgggtcacctataaatattgtgacacaagggttcttgactccccttgtttcccaaactccagctgtcgcgatagccgtggggtacaggttggcacctgagcaccctctccctatcgcgtacgacgattgttgggccgtgttacaatggatcacggcccatgctaatgggtctgggcccgactcatggattaatgattatgtggacatgagtcgggtttatttgatgggagagagtgctggagcgaatcttgctcattacttagcggtccaagctggagttaataaaattgggttagggattcgtgggttaattatattgcatccgtattttgctcaaaaggagcctgataagttgattaagtatttgtacccgggtagttctgggtcaaatgatgacccaaaactttaccctggtgcagatccggatcttgagaaattgagttgccccaaggtattgatagtggttgctgaaaaagactttttgaagccgcgaggcattgactataaagagactttagaaaaaagtaaatggggagggagtattgagtttatggagaatgaaggtgaaggtcattgcttttatttgtttgatccatctagtgaaaaggccaagggtctaattcaaaggttgatttcttatgtaaatcagtgatttaggtatgtttgtcatttttattttgtgggtcgaactaataaatttatcaaattagagttatgaaatgaatgaatgaaatcgtttgacgaaaaaaaaaaaaaaaaaaaaa

SEQ ID NO: 209 - protein, 304 aa, Artemisia tridentata
MSSSTETETTHDFAPFLRVYKDGRVERLLTTPRLPPSTDPITGVQSKDVAIAPDIDVKTRIFLPKMDELDASKKLPLIIYVHGGGFCIGSPINIVTQGFLTPLVSQTPAVAIAVGYRLAPEHPLPIAYDDCWAVLQWITAHANGSGPDSWINDYVDMSRVYLMGESAGANLAHYLAVQAGVNKIGLGIRGLIILHPYFAQKEPDKLIKYLYPGSSGSNDDPKLYPGADPDLEKLSCPKVLIVVAEKDFLKPRGIDYKETLEKSKWGGSIEFMENEGEGHCFYLFDPSSEKAKGLIQRLISYVNQ

SEQ ID NO: 210 - DNA, 1136 bp, Artemisia tridentata
gacattcactcttaacaataaacacaaaaaaatacatccaaaatggttaccgaaagaaaaatcatcgataatgtttcgggctggatgacaatgtacgacgacggttgtgttgagcgtgcatttactggaccaccacaatttaagttcatgtctgatcccgtagcaccacatgcccatttcatcgacggtgttgctgtccacgatatctctatcaacgatgattccaatcttcgtgttcgtatttatgttcctgaggtgctggataccaatactgcaaagctacccataattctccactttcacggtggaggattttgcattagccaaccagattggttcatgtactataatatttatactcgtctagcccgtgaagctggagttgtagtggttagtcctttcctccgtcttgcacccgagcatcgtctccctgccgcgattgatgatgcctacaacacacttctttggctcaaagaattggcagaccataaaaccatccaatcactaggaacaaatcaacatattcgagactggttgtctactaagggagacttcacccgtgttttcctcattggagacagttcgggtgggaacatagttcaccaagtggccaaaaaggcatcagaagaaaatctcaatccactaaaactggctggagcaatcccagtccacccgggatttctccggtcagtaaaaagcaagtcagagatggaaaaagcagaatcaccatttttgactctagacatgttgtataaatttttgaattttggattgcccgagggaagcactagagaccatcccataacatgtccaatggacgattcattggagggtttggatttgccaccgtatctgctatgtgtggctgaggaggatctcgtgattgctacgaatatggagttttacgaagcgttgaggaaaagtggaaagaacgttgagttgttggtgagtaatggagttggacatagcttttatctcaacaaggtcgctattgatttcgacccagtcacatctaagcaaactcataaactgatcgaagggatcgttaactttgttgcaaaccactagtttacttatttgagatcatgctatgatcatgaataaattatgagttgtattaaaaaaaaaaaaaaaaa

SEQ ID NO: 211 - protein, 341 aa, Artemisia tridentata
MVTERKIIDNVSGWMTMYDDGCVERAFTGPPQFKFMSDPVAPHAHFIDGVAVHDISINDDSNLRVRIYVPEVLDTNTAKLPIILHFHGGGFCISQPDWFMYYNIYTRLAREAGVVVVSPFLRLAPEHRLPAAIDDAYNTLLWLKELADHKTIQSLGTNQHIRDWLSTKGDFTRVFLIGDSSGGNIVHQVAKKASEENLNPLKLAGAIPVHPGFLRSVKSKSEMEKAESPFLTLDMLYKFLNFGLPEGSTRDHPITCPMDDSLEGLDLPPYLLCVAEEDLVIATNMEFYEALRKSGKNVELLVSNGVGHSFYLNKVAIDFDPVTSKQTHKLIEGIVNFVANH

SEQ ID NO: 212 - DNA, 1106 bp, Artemisia tridentata
ggcattaaccaccccatctgcttcatctatttcatcccatatctatcatagttttcataaaagaaaaatgtcttcatcgacagaaaccgagatctcccatgatttcgcgccgtttttacgtgtatacaaagatggacatgtcgaacgtttgctcaccacaccccgtttgccaccctccaccgatcctataaccggtgttcaatccaaagacgttgttatctcacccgatatcgatgtgaaaacccgaatattcctccctaaaatggacgaactggatgcatccaaaaagcttcctctgatcgtttatgtgcatggtggggggttttgtattgggtcacctataaatattgtgacacaagggtttttgactccccttgtttcccaaactccagctgtcgcgatagccgtggggtacaggttggcacctgagcaccctctccctatcgcgtacgacgattgttgggccgtgttccaatggatcacggcccatgctaatgggtctgggcccgactcatggattaatgattatgtggacatgagtcgggtttatttgatgggagagagtgctggagcgaatcttgctcattacttagcggtccaagctggagttaataaaattgggttagggattcgtgggttaattacattgcatccgtattttgctcaaaaggagcctgataagttgattaagtatttgtacccgggtagttctgggtcaaatgatgacccaaaactttacccgggtgcagatccggatcttgagaaatttagttgccccaaggtattgatagtggttgctgaaaaagactttttgaagccgcgaggcattgattataaagagacgttagaaaaaagtaaatggggagggagtattgagtttatggagaatgaaggtgaaggtcattgcttttatttgtttgatccatctagtgaaaaggccaagggtctaattcaaaggttgatttcttatgtaaatcagtgatttagtggtatgttcgtcatttttattttgtgggtcgaactagtaataaatttatcaaattattagagttatgaaatgaatgaatgaaatcgtttgatgtattttgacgaaaaaaaaaaaaaaa

SEQ ID NO: 213 - protein, 304 aa, Artemisia tridentata
MSSSTETEISHDFAPFLRVYKDGHVERLLTTPRLPPSTDPITGVQSKDVVISPDIDVKTRIFLPKMDELDASKKLPLIVYVHGGGFCIGSPINIVTQGFLTPLVSQTPAVAIAVGYRLAPEHPLPIAYDDCWAVFQWITAHANGSGPDSWINDYVDMSRVYLMGESAGANLAHYLAVQAGVNKIGLGIRGLITLHPYFAQKEPDKLIKYLYPGSSGSNDDPKLYPGADPDLEKFSCPKVLIVVAEKDFLKPRGIDYKETLEKSKWGGSIEFMENEGEGHCFYLFDPSSEKAKGLIQRLISYVNQ

SEQ ID NO: 214 - DNA, 1219 bp, Artemisia tridentata
gatctatcttatctttagctctcgcaattttctaacaaatggcatcaccagacgaaatccttatagaaatcccgtacgtcattcgcgtcaacaaagacggtcgggtcgttaaactcggtggcaccaatgttgtcccagccggtattgatccgaacacgggcgttcaatctaaagacgtcattacctcacccgaaacaaatggttttgttaggatttacattcctaagactgcaaattcgaatgtaaaaaaactcccacttttggtttacttccatggcggcgcttttataatcgaaacagtcgcctcacctacgtaccataacttccttaacctcgtatcatccgaatccaacgttgttgtagtgtccgtggactataggactgcgcccgagcatcctatccccgcttgttttgatgattcatgggaagcagtcaagtgggtcgcacaacatgttaatggaaatggacccgacacatggctaaacgaatacacggattttagccatgtgtttttcgctggagatagcgcaggtggtaatatagctcaccatatggcaatcagggttggttcagacaatttgggtcgggtttcaggtgaaagtttgaatcttgagggtattatattgctccacccgtacttttggggggaagataggatgggttcggagtcggattctccatggaccaaagcagttaaagaattatggctaattgcccatccggggacaagcgggttagatgacccgcttattaacccagataaggattcgaaggtgtcggatcttagttgctctagggtacttgtttgtgttgctgggaaggatatattgaaggataggggaattcactataaggttattttgggtaaaaatggatggaaaggtgacatagaggttatcgaggataaagaggaggatcatgtgtttttcctaaatagtccgcttgccgaaatctcgtgcaccttgcgcaagaggatttgtattttcatcaacaactagaaagagatcatgcttcaagggtgtgttcacgttaaaataaagtaatatgatattgtttcacgttaaaataaaataatatgatattgtttcaagggtgtgttcataaattatttcagtctagagattgttatggtttttattgtttagcatgcatgcttatatataaagtgtttattggcacactcttatttttaaaaaaaaaaaaaaaaaaaaaaaaaaaa

SEQ ID NO: 215 - protein, 319 aa, Artemisia tridentata
MASPDEILIEIPYVIRVNKDGRVVKLGGTNVVPAGIDPNTGVQSKDVITSPETNGFVRIYIPKTANSNVKKLPLLVYFHGGAFIIETVASPTYHNFLNLVSSESNVVVVSVDYRTAPEHPIPACFDDSWEAVKWVAQHVNGNGPDTWLNEYTDFSHVFFAGDSAGGNIAHHMAIRVGSDNLGRVSGESLNLEGIILLHPYFWGEDRMGSESDSPWTKAVKELWLIAHPGTSGLDDPLINPDKDSKVSDLSCSRVLVCVAGKDILKDRGIHYKVILGKNGWKGDIEVIEDKEEDHVFFLNSPLAEISCTLRKRICIFINN

SEQ ID NO: 216 - DNA, 1211 bp, Artemisia tridentata
gatctatcttatctttagctctcacaattttctaacaaatggattcatcaccagacgaaatccttatagaaatcccgtacgtcattcgcgtcaacaaagacggtcgggtcgttaaactcggtggcaccaatgttgtcccagccggtattgatccgaacacgggcgttcaatctaaagacgtcattacctcacccgaaacaaatggttttgttaggatttacattcctaagactgcaaattcgaatgtaaaaaaactcccacttttggtttacttccatggcggcgcttttataatcgaaacagccgcctcacctacgtaccataacttccttaacctcgtatcatccgaatccaacgttgttgtggtgtccgtggactataggactgcgcccgagcatcctgtccccgcttgttttgatgattcatgggaagcagtcaagtgggtcgcacaacatgttaatggaaatggacccgatacgtggctaaacgattacacggattctagccatgtgtttttcgctggagatagcgcgggtggtaatatagctcaccatatggcaatcagggttggctcagacaatttgggtcgggtttcaggtgaaagtttgaatcttgagggtattatattgctccacccgtacttttggggggaagataggatgggttcggagtcggattctccatggaccaaagcagttaaagaattatggctaattgcccatccggggacaagcgggttagatgacccgcttattaacccggataaggattcgaaggtgtcggatcttagttgctctagggtacttgtttgtgttgctgggaaggatatattgaaggataggggaatttactataaggttattttgggtaaaaatggatggaaaggtgacatagaggttatcgaggataaagaggaggatcatgtgtttttcctaagtagtccgcttgccgaaatctcgtgcaccttgcgcaagaggatttgtattttcatcaacaactagaaagagatcatgcttcaagggtgtgttcacgttaaaataaagtaatatgatattgtttcacattaaaataaaataatatgatattgtttcaagggtgtgttcataaattatttcagtctagagattgttatggtttttattatttagcatgcatgcttatatataaagtgtttattggcacactcttattttaaaaaaaaaaaaaaaaaa

SEQ ID NO: 217 - protein, 320 aa, Artemisia tridentata
MDSSPDEILIEIPYVIRVNKDGRVVKLGGTNVVPAGIDPNTGVQSKDVITSPETNGFVRIYIPKTANSNVKKLPLLVYFHGGAFIIETAASPTYHNFLNLVSSESNVVVVSVDYRTAPEHPVPACFDDSWEAVKWVAQHVNGNGPDTWLNDYTDSSHVFFAGDSAGGNIAHHMAIRVGSDNLGRVSGESLNLEGIILLHPYFWGEDRMGSESDSPWTKAVKELWLIAHPGTSGLDDPLINPDKDSKVSDLSCSRVLVCVAGKDILKDRGIYYKVILGKNGWKGDIEVIEDKEEDHVFFLSSPLAEISCTLRKRICIFINN

SEQ ID NO: 218 - DNA, 1133 bp, Artemisia tridentata
gaacaaacattacaaagaaaaatgccttctacttctgctccaggaaagttagcaacatccgacatatttcccatccaacttcgtttttttcttaaagtacacgaagatggtcgatgtgaaagatttgtcgggacgactatcttaccatcgggtgtcgatcctttaaccggagttcattctaaagatattgtcatctcacccgaaaccaacctcagtgcaagaatttacattcccaaaaatgctacaacgggccgtagattgcctatattgatttattatcatggtggggggtttgtagtcgactccccaaggtctactacttatcaacctacgttaaaccttctaactgcggagtcagatgtagtcattgttgctattgactacaggttagctccagaatatccaatacctattggatataacgactcttgggaagcaatcaagtgggttgctacccattctaagggcagtggacccgaagcgtggttaaatgattatgctgattttgagaaagttttctttattggagatagtgccggcgcgaatatagctcataacatggcaattcgggccgggctagaacctattaaagaactaaatttagaaggtcttattctactcaacccttattttggaggaaacgaccccattggattggaatgtggaaagaataaggagcttaaaggttttactgatgagttttggttgttcgcgaatccatcagggagtgggctagatgacccgcagtttaatccggctaagaacccgaatctttcggctttgggctgctctaggatctttgtttcggttgctgaatatgatacatttagggacaggggttttctttacaatgaattaatggaaaaaagtggatggaatggaaaattggagtttacggagacgaaaaatgagaatcatgtgttctttttgtttgatacttcttgtgacaatgcatgtaacttgcgcgacactgtttgtactttcatcaatcggtctcaaaattaaatagtctttagtaataattgtatttgattttccgttcttgcagaacaaattgttgttatattgtgtttttgtgatatgaatatactaaataaattgtatttttgtttagtaaaaaaaaaaaaaaaaaa

SEQ ID NO: 219 - protein, 327 aa, Artemisia tridentata
MPSTSAPGKLATSDIFPIQLRFFLKVHEDGRCERFVGTTILPSGVDPLTGVHSKDIVISPETNLSARIYIPKNATTGRRLPILIYYHGGGFVVDSPRSTTYQPTLNLLTAESDVVIVAIDYRLAPEYPIPIGYNDSWEAIKWVATHSKGSGPEAWLNDYADFEKVFFIGDSAGANIAHNMAIRAGLEPIKELNLEGLILLNPYFGGNDPIGLECGKNKELKGFTDEFWLFANPSGSGLDDPQFNPAKNPNLSALGCSRIFVSVAEYDTFRDRGFLYNELMEKSGWNGKLEFTETKNENHVFFLFDTSCDNACNLRDTVCTFINRSQN

SEQ ID NO: 220 - DNA, 1153 bp, Artemisia tridentata
gatctcacatactatctttaactctttccataatacacacttaaaaaacacatagttatgggctcggttagtaaagaaatacttcacgatgtaccaccatacatacgagtctacaaagacggaactatcgaacgtctcgtaggaaccgaaaccagtccaccgggccacgatcccgtaaatggtgtcacctcaaaagacatcaacataaccacacaaaaaaccaacatctcagctagaatatatcgtccaacaaacaccatagtcgatgaaaagctcccacttgttatatactttcatggtggagcatttgtcatttcatcacccgcggacccaaagtaccatgcatccgttagtaaacttgttgcagaatcacatgtgattgcagtatctgttgattataggttagctccggagaatcctcttccggctgcttttgaggatgcctatgaagccctgagttgggtctctgaccatgctcctgacggacctggttccgaggagtggatcagagaccacgttgactttgacaaaatatttattggcggagattctgctggtgcgactatagcgcaccagatggctctccgggtgagccagactgaggttcagcctggctcagaacttaaatataagatattgggtattataataataaacccgtatttttgggggaaggatccaattggggcggagaaaacgaagagctttttgaagagcatggtagataagtggtgggaatttgtgtgtccatcggattcggatctcgggttggatcacccgttgattaacccgtttgtggacggggctccggatttgtcgggtttgggttgtgggcgagtttttgtgaccgtttcggaaatggatatattgaaagatagagggtgggcttattatgaaaagttagggaagagtaattatgaaggcaaagttgagatgcatgaagttgaaggtgaagatcatgtttttcatatatttgatgctaatgcggaaaaagccgttaatttgatgaaaaaaataggtacttttataaatgaaaaatagtttgatattttaagaattatgacttatgttattggtttggcatgtcttgtgatgtagtaatacaaaagtttgttattggttgttttcgatctaaaaaaaaaaaaaaaaaaaa

SEQ ID NO: 221 - protein, 327 aa, Artemisia tridentata
MGSVSKEILHDVPPYIRVYKDGTIERLVGTETSPPGHDPVNGVTSKDINITTQKTNISARIYRPTNTIVDEKLPLVIYFHGGAFVISSPADPKYHASVSKLVAESHVIAVSVDYRLAPENPLPAAFEDAYEALSWVSDHAPDGPGSEEWIRDHVDFDKIFIGGDSAGATIAHQMALRVSQTEVQPGSELKYKILGIIIINPYFWGKDPIGAEKTKSFLKSMVDKWWEFVCPSDSDLGLDHPLINPFVDGAPDLSGLGCGRVFVTVSEMDILKDRGWAYYEKLGKSNYEGKVEMHEVEGEDHVFHIFDANAEKAVNLMKKIGTFINEK

SEQ ID NO: 222 - DNA, 1158 bp, Artemisia tridentata
gaacaatgataatattgcaactacatttccacccacattaaagtcacattcaagtcttcaacaactttaatcatcatccattcaattttgtgacgcattaaccaccccatctgcttcatctatttcatcccacatctatctatcatagttttcataaaagaagaatgtcttcatcgaccaaaaccgagaccacccatgatttcgcgccgtttttacgtgtatacaaagatggacgtgtcgaacgtttgctcacaacaccccgtttgccaccctccaccgatcctataaccggtgttcaatccaaagacgttgttatatcacccgatatcgatgtgaaaacccgaatattcctccctaaaatggacgaactggatgcatccaaaaagcttcctctgatcatttatgtgcatggtggggggttttgtattgggtcacctataaatattgtgacacaagggtttttgactccctttgtttcccaaactccagctgtcgcgatagccgtggggtacaggttggcacctgagcaccctctccctatcgcgtacgacgattgttgggccgtgttccaatggatcacggcccatgctaatgggtctgggcccgactcatggattaatgattatgtggacatgagtcgggtttatttgatgggagagagtgctggagcgaatcttgctcattacttagcggtccaagctggagttaataaaattgggttagggattcgtgggttaattacattacatccgtattttgctcaaaaggagcctgataagttgatcaagtatttgtacccgggtagttctgggtcaaatgatgacccaaaactttaccctggtgcagatccggatcttgagaaattgagttgccccaaggtattgatagtggttgctgaaaaagactttttgaagccgcgaggcattgactataaagagactttagaaaaaagtaaatggggagggagtattgagtttatggagaatgaaggtgaaggtcattgcttttatttgtttgatccatctagtgaaaaggccaagggtctaattcaaaggttgatttcttatgtaaatcagtgatttagtggtatgttcgtcatttttattttgtgggtcgaactagtaataaatttatcaaaaaaaaaaaaaaaaaaaaaaa

SEQ ID NO: 223 - protein, 304 aa, Artemisia tridentata
MSSSTKTETTHDFAPFLRVYKDGRVERLLTTPRLPPSTDPITGVQSKDVVISPDIDVKTRIFLPKMDELDASKKLPLIIYVHGGGFCIGSPINIVTQGFLTPFVSQTPAVAIAVGYRLAPEHPLPIAYDDCWAVFQWITAHANGSGPDSWINDYVDMSRVYLMGESAGANLAHYLAVQAGVNKIGLGIRGLITLHPYFAQKEPDKLIKYLYPGSSGSNDDPKLYPGADPDLEKLSCPKVLIVVAEKDFLKPRGIDYKETLEKSKWGGSIEFMENEGEGHCFYLFDPSSEKAKGLIQRLISYVNQ

SEQ ID NO: 224 - DNA, 1200 bp, Artemisia tridentata
gatcctttaactctttccttaatgcacacttaaaaaacacaaacagttatgggctcggttagtagagaaatacttcacgatgtaccaccatacatacgagtctacaaagacggaacaatcgaacgtctcgtaggaaccgaaaccaccccaccgggccacgatcccgtaaatggtgtcacctcaaaagacatcacaataagcacaccaaaaaccaacatctcagctagaatatatcgtccaacaagcaccatagtcaatgaaaagctcccacttgttatatactttcatggtggagcatttgtcattgcatcacccgcggaaccaaagtaccatgcatccgttattaaacttgttgcagaatcacatgtgattgcagtatctgttgattataggttagctccggagaatcctcttccggctgcttttgaggatgcctatgaagccctgagttgggtctctgatcatgctcctgacggacctggttccgatgagtggatcagagaccacgttgactttgacaaaatatttattggcggagattctgctggtgcgactatagcgcaccacatggctctccgggtgagccagactgaggttcagcctggctcagaacttaaatataagatatttggtattatattaataaacccgtatttttgggggaaggatccaattggggcggagaaaacgaagagctttttgaagagcatggtagataagtggtgggaatttgtgtgtccatcggattcggatctcgggttggatcacccgttgattaacccgtttgtggacggggctccggatttgtcgggtttgggttgtgggcgagtttttgtgaccgtttcggaaatggatatattgaaagatagagggtgggcttattatgaaaagttagtgaagagtaattatgaaggcaaagttgagatgcatgaagttgaaggcgaagatcatgtttttcatatatttgatgctaatgcggaaaaagccgttaatttgatgaaaaaaataggtacttttataaatgaaaaatagtttgatattttaagaattatgaattttgttattggtttggcatgtgttgtgatgtaatagaaaagtttgttatttgttgttttcgatctagttgaaatagtgacttgtatttaatggaataataatgggctggttgttgttttgtaaaaaaaaaaaaaaaaaaaaaaa

SEQ ID NO: 225 - protein, 327 aa, Artemisia tridentata
MGSVSREILHDVPPYIRVYKDGTIERLVGTETTPPGHDPVNGVTSKDITISTPKTNISARIYRPTSTIVNEKLPLVIYFHGGAFVIASPAEPKYHASVIKLVAESHVIAVSVDYRLAPENPLPAAFEDAYEALSWVSDHAPDGPGSDEWIRDHVDFDKIFIGGDSAGATIAHHMALRVSQTEVQPGSELKYKIFGIILINPYFWGKDPIGAEKTKSFLKSMVDKWWEFVCPSDSDLGLDHPLINPFVDGAPDLSGLGCGRVFVTVSEMDILKDRGWAYYEKLVKSNYEGKVEMHEVEGEDHVFHIFDANAEKAVNLMKKIGTFINEK

SEQ ID NO: 226 - DNA, 1167 bp, Artemisia tridentata
gacaatggcttccaacgacaaagagatagtcattgatcttgttccattccttcgaacctacaaaaccggcactgtcgagcgccttatctcatcgccatatgtcccagcttcacctgtaaacaatccaactgatggcgtttgctccaaagacatcactatctcccctcatgtctcggctcgaatctaccttccgagtcaagcattaaccactactaataagctcccggtcttagtttactatcatggtggtggcttttgcctcgagtccgccttttgtgcactctttcatagctacgttaactccatagtgtccaagtcacaatctataattgcaatatctgttgaatacagattagcccccgaaaaccctttaccagctgcctatgaagactcgtgggttgctttaaattgggttacttctcattttgatcaagaaacttacccgcaaaacaaagatcaatggatacttgactttgcaaattttgataaactttatataggtggagatagtgcgggtggtaatattgtccataacatggccatccgagctgggatcgagaaactaaaaggtggtgtaaagatccatggagggtttttatctcatccgcatttttggggttctaaggcaattcgttcggagccgagtgagaaccgtgacgctagttggttatcaagggtgtggaaggttgtgtaccccgactcaccgggtggtgatgacaacccaatgatgaatccgtttgttgatggtgcacctaggattgcgggtttaggggttagaaagttactggttttggcgtcgtcggataaagatgagatgagtgatagaggtgttgagtatgtcgaacaagtgaagaatagtgggtggggtggggatgtcgagttggtggagtacaaaggtactggcgggcattgcttcaacctttttaatcctgacgatgatgactccaaggactttatcaatcggttggtttcttttatccggtaatagtcgtgtatcgtaattttcgtaagcatgtttatctatgatttgttataacatgatattaacatcatctatgatgtcttgcactttatactccaggtttgaaacaccatgtaattgtgagttttgtattgcatacattctgttgttaataaatgcattttgcccaaaaaaaaaaaaaaaaa

SEQ ID NO: 227 - protein, 326 aa, Artemisia tridentata
MASNDKEIVIDLVPFLRTYKTGTVERLISSPYVPASPVNNPTDGVCSKDITISPHVSARIYLPSQALTTTNKLPVLVYYHGGGFCLESAFCALFHSYVNSIVSKSQSIIAISVEYRLAPENPLPAAYEDSWVALNWVTSHFDQETYPQNKDQWILDFANFDKLYIGGDSAGGNIVHNMAIRAGIEKLKGGVKIHGGFLSHPHFWGSKAIRSEPSENRDASWLSRVWKVVYPDSPGGDDNPMMNPFVDGAPRIAGLGVRKLLVLASSDKDEMSDRGVEYVEQVKNSGWGGDVELVEYKGTGGHCFNLFNPDDDDSKDFINRLVSFIR

SEQ ID NO: 228 - DNA, 1265 bp, Artemisia tridentata
ggaattagcagccattgactccaccactctatcatatcaatttttttgctatataaacacaaacacaaccaacgcaaatcacattcactcttaacaataagcacaaaaaaatacatccaaaatggttaccgaaagaaaaatcatcgataatgtttcgggctggatgacaatgtacgacgacggttgtgttgagcgtgcatttactggaccaccacaatttaagttcatgtctgatcccgtagcaccacatgcccatttcatcgacggtgttgctgtccacgatatctctatcaacgatgattccaatcttcgtgttcgtatttatgttcctgaggtactagataccaatactgcaaagctacccataattctccactttcacggtggaggattttgcattagccaaccagattggttcatgtactataatatttatactcgtctagcccgtgaagctggagttgtagtggttagtcctttcctccgtcttgcacccgagcatcgtctccctgccgcgattgatgatgcctacaacacacttctttggctcaaagaattggctgaccataaaaccatccaatcactaggaacaaatcaacatattcgagactggttgtctactaagggagacttcacccgtgttttcctcattggagacagttcgggtgggagcatagttcaccaagtggccaaaaaggcatcagaagaaaatctcaatccactaaaactggctggagcaatcccagtccacccgggatttctccggtcagtaaaaagcaagtcagagatggaaaaagcagaatcaccatttttgactctagacatgttgtataaatttttgaattttggattgcccgagggaagcactggagaccatcccacaacatgtccaatggacgattcattggagggtttggatttgccaccgtatctgctatgtgtggctgaggaggatctcgtgattgctacgaatatggagttttacgaagcgttgaggaaaagtggaaagaacgttgagttgttggtgagtaatggagttggacatagcttttatctcaacaaggtcgctattgatttcgacccagtcacatctaagcaaactcataaactgatcgaagggatcgttaactttgttgcaaaccactagtttacttatttgagatcatgctatgatcatgaataaattatgagttgtattgatcatgtttcttataagattggcatattcttatttggtacatgtttgttccaaaaaaaaaaaaaaa

SEQ ID NO: 229 - protein, 341 aa, Artemisia tridentata
MVTERKIIDNVSGWMTMYDDGCVERAFTGPPQFKFMSDPVAPHAHFIDGVAVHDISINDDSNLRVRIYVPEVLDTNTAKLPIILHFHGGGFCISQPDWFMYYNIYTRLAREAGVVVVSPFLRLAPEHRLPAAIDDAYNTLLWLKELADHKTIQSLGTNQHIRDWLSTKGDFTRVFLIGDSSGGSIVHQVAKKASEENLNPLKLAGAIPVHPGFLRSVKSKSEMEKAESPFLTLDMLYKFLNFGLPEGSTGDHPTTCPMDDSLEGLDLPPYLLCVAEEDLVIATNMEFYEALRKSGKNVELLVSNGVGHSFYLNKVAIDFDPVTSKQTHKLIEGIVNFVANH

SEQ ID NO: 230 - DNA, 1042 bp, Artemisia tridentata
gaaaagaaaaatgtcttcatcgaccgaaaccgagaccacccatgatttcgcgccgtttttacgtgtatacaaagatggacgtgtcgaacgtttgctcacaacaccccgtttgccaccctccaccgatcctataactggtgttcaatccaaagacgttgttatatcacccgatatcgatgtgaaaacccgaatattcctccctaaaatggacgaactggatgcatccaaaaagcttcctctgatcatttatgtgcatggtggggggttttgtattgggtcacctataaatattgtgacacaagggtttttgactccctttgtttcccaaactccagctgtcgcgatagccgtggggtacaggttggcacccgagcaccctctccctatcgcgtacgacgattgttgggccgtgttccaatggatcacggcccatgctaatgggtctgggcccgactcatggattaatgattatgtggacatgagtcgggtttatttgatgggagagagtgctggagcgaatcttgctcattacttagcggtccaagctggagttaataaaattgggttagggattcgtgggttaattacattgcatccgtattttgctcaaaaggagcctgataagttgattaagtatttgtacccgggtagttctgggtcaaatgatgacccaaaactttacccgggtgcagatccggatcttgagaaatttagttgccccaaggtattgatagtggttgctgaaaaagactttttgaagccgcgaggcattgattataaagagacgttagaaaaaagtaaatggggagggagtattgagtttatggagaatgaaggtgaaggtcattgcttttatttgtttgatccatctagtgaaaaggccaagggtctaattcaaaggttgatttcttatgtaaatcagtgatttagtggtatgtttgtcatttttattttgtgggtcgaactagtaataaatttatcaaattattagagttatgaaatgaatgaatgaaatcatttgactaaaaaaaaaaaaaaaaaa

SEQ ID NO: 231 - protein, 304 aa, Artemisia tridentata
MSSSTETETTHDFAPFLRVYKDGRVERLLTTPRLPPSTDPITGVQSKDVVISPDIDVKTRIFLPKMDELDASKKLPLIIYVHGGGFCIGSPINIVTQGFLTPFVSQTPAVAIAVGYRLAPEHPLPIAYDDCWAVFQWITAHANGSGPDSWINDYVDMSRVYLMGESAGANLAHYLAVQAGVNKIGLGIRGLITLHPYFAQKEPDKLIKYLYPGSSGSNDDPKLYPGADPDLEKFSCPKVLIVVAEKDFLKPRGIDYKETLEKSKWGGSIEFMENEGEGHCFYLFDPSSEKAKGLIQRLISYVNQ

SEQ ID NO: 232 - DNA, 1209 bp, Artemisia tridentata
ggatcttatctttagctctcacaattttctaacaaatggattcatcaccagacgaaatccttatagaaatcccgtacatcattcgcgtctacaaagatggtcgggtcgttaaactcaatggcaccaatgttgtcccagccggtattgatccgagcacgggcgttcaatctaaagacgtcgttatctcacctgaaagaaatggttttgttaggatttacattcctaagactgcaaattcgaatgtaaaaaaactcccacttttggtttacttccatggcggcgcttttataatcgaaacagccgcctcacctacgtaccataacttccttaacctcgtatcatccgaatctgacgttgttgtagtgtccgtggactataggaatgcgcccgagcatcctgtccccgcttgttttgatgattcatgggaagcagtcaagtgggtcgcacaacatgttaatggaaatggacccgatacgtggctaaacgattacacggattctagccatgtgtttttcgccggagatagcgcgggtggtaatatagctcaccatatggcaatcagggttggttcagacaatttgggtcgggtttcaggtgaaagtttgaatcttgagggtattatattgctccacccgtacttttggggggaagataggatgggttcggagtcggattctccatggaccaaagcagttaaagaattatggctaattgcccatcctgggacaagcgggttagatgacccgctgattaacccggataaggattcgaaggtgtcggatcttagttgctctagggtacttgtttgtgttgctgggaaggatttattgaaggataggggaatttactataaggttattttgggtaaaaatggatggaacggtgacatagaggttatcgaggataaagaggaggatcatgtgtttttcctaaatagtcctcttgctgaaatctcttgcaccttgcgcaagaggatttgtactttcatcaacaactagaagagatcatgctcatcacgttaaaataaaataatatgatatggtttcaggttttgttcataaattatttcagtctagagattattatggtttttattgtttagcatgcatgcttatacataaagtgtttattgacacactcttatttttatccgcatactctaatatacaatgggtcaaggaggatattgttccaaaaaaaaaaaaaaaa

SEQ ID NO: 233 - protein, 320 aa, Artemisia tridentata
MDSSPDEILIEIPYIIRVYKDGRVVKLNGTNVVPAGIDPSTGVQSKDVVISPERNGFVRIYIPKTANSNVKKLPLLVYFHGGAFIIETAASPTYHNFLNLVSSESDVVVVSVDYRNAPEHPVPACFDDSWEAVKWVAQHVNGNGPDTWLNDYTDSSHVFFAGDSAGGNIAHHMAIRVGSDNLGRVSGESLNLEGIILLHPYFWGEDRMGSESDSPWTKAVKELWLIAHPGTSGLDDPLINPDKDSKVSDLSCSRVLVCVAGKDLLKDRGIYYKVILGKNGWNGDIEVIEDKEEDHVFFLNSPLAEISCTLRKRICTFINN

SEQ ID NO: 234 - DNA, 1187 bp, Artemisia tridentata
gatctatcttatctttagctctcacaattttctaacaaatggattcatcaccagacgaaatccttatagaaatcccgtacatcattcgcgtctacaaagatggtcgggtcgttaaactcaatggcaccaatgttgtcccagccggtattgatccgagcacgggcgttcaatctaaagacgtcgttatctcacccggaagaaatggttttgttaggatttacattcctaagactgcaaattcgaatgtaaaaaaactcccacttttggtttacttccatggcggcgcttttataatcgaaacagccgcctcacctacgtaccataacttccttaacctcgtatcatccgaatctgacgttgttgtagtgtccgtggactataggaatgcgcccgagcatcctgtccccgcttgttttgatgattcatgggaagcagtcaagtgggtcgcacaacatgttaatggaaatggacccgatacgtggctaaacgattacacggattctagccatgtgtttttcgctggagatagcgcgggtggtaatatagctcaccatatggcaatcagggttggttcagacaatttgggtcgggtttcaggtgaaagtttgaatcttgagggtattatattgctccacccgtacttttggggggaagataggatgggttcggagtcggattctccatggaccaaagcagttaaagaattatggctaattgcccatccggggacaagcgggttagatgacccgctgattaacccggataaggattcgaaggtgtcggatcttagttgctctagggtacttgtttgtgttgctgggaaggatttattgaaggataggggaatttactataaggttattttgggtaaaaatggatggaacggtgacatagaggttatcgaggataaagaggaggatcatgtgtttttcctaaatagtcctgttgctgaaatctcttgcaccttgcgcaagaggatttgtactttcatcaacaactagaagagatcatgcttcaaggaatatgacatccatcacgttaaaataaaataatatgatatggtttcaggttttgttcataaattatttcagtctagagattattatggtttttattgtttagcatgcatgcttatatataaagtgtttattgacacactcttatttctaaaaaaaaaaaaaaaaaaa

SEQ ID NO: 235 - protein, 320 aa, Artemisia tridentata
MDSSPDEILIEIPYIIRVYKDGRVVKLNGTNVVPAGIDPSTGVQSKDVVISPGRNGFVRIYIPKTANSNVKKLPLLVYFHGGAFIIETAASPTYHNFLNLVSSESDVVVVSVDYRNAPEHPVPACFDDSWEAVKWVAQHVNGNGPDTWLNDYTDSSHVFFAGDSAGGNIAHHMAIRVGSDNLGRVSGESLNLEGIILLHPYFWGEDRMGSESDSPWTKAVKELWLIAHPGTSGLDDPLINPDKDSKVSDLSCSRVLVCVAGKDLLKDRGIYYKVILGKNGWNGDIEVIEDKEEDHVFFLNSPVAEISCTLRKRICTFINN

SEQ ID NO: 236 - DNA, 1138 bp, Artemisia tridentata
gatctatcttatctttagctctcacaattttctaacaaatggattcatcaccagacgaaatccttatagaaatcccgtacgtcattcgcgtcaacaaagacggtcgggtcgttaaactcggtggcaccaatgttgtcccagccggtattgatccgaacacgggcgttcaatctaaagacgtcattacctcacccgaaacaaatggttttgttaggatttacattcctaagactgcaaattcgaatgtaaaaaaactcccacttttggtttacttccatggcggcgcttttataatcgaaacagccgcctcacctacgtaccataacttccttaacctcgtatcatccgaatccaacgttgttgtagtgtccgtggactataggactgcgcccgagcatcctgtccccgcttgttttgatgattcatgggaagcagtcaagtgggtcgcacaacatgttaatggaaatggacccgacacatggctaaacgaatacacggattttagccatgtgtttttcgctggagatagcgcgggtggtaatatagctcaccatatggcaatcagggttggttcagacaatttgggtcgggtttcaggtaaaagtttgaatcttgagggtattatattgctccacccgtacttttggggggaagataggatgggttcggagtcggtttctccatggaccaaagcagttaaagaattatggctaattgcccatccggggacaagcgggttagatgacccgcttattaacccggataaggattcgaaggtgtcggatcttagttgctctagggtacttgtttgtgttgctgggaaggatatattgaaggataggggaatttactataaggttattttgggtaaaaatggatggaaaggtgacatagaggttatcgaggataaagaggaggatcatgtgtttttcctaagtagtccgctcgccgaaatctcgtgcaccttgcgcaagaggatttgtattttcatcaacaactagaaagagatcatgcttcaagggtgtgttcacgttaaaataaagtaatatgatactgtttcacgttaaaataaaataatatgatattgtttcaagggtgtgttcataaattatttcagtctagagattgttatggtttt

SEQ ID NO: 237 - protein, 320 aa, Artemisia tridentata
MDSSPDEILIEIPYVIRVNKDGRVVKLGGTNVVPAGIDPNTGVQSKDVITSPETNGFVRIYIPKTANSNVKKLPLLVYFHGGAFIIETAASPTYHNFLNLVSSESNVVVVSVDYRTAPEHPVPACFDDSWEAVKWVAQHVNGNGPDTWLNEYTDFSHVFFAGDSAGGNIAHHMAIRVGSDNLGRVSGKSLNLEGIILLHPYFWGEDRMGSESVSPWTKAVKELWLIAHPGTSGLDDPLINPDKDSKVSDLSCSRVLVCVAGKDILKDRGIYYKVILGKNGWKGDIEVIEDKEEDHVFFLSSPLAEISCTLRKRICIFINN

SEQ ID NO: 238 - DNA, 1114 bp, Artemisia tridentata
gagcagaataaatactactattcacataatttctacatctatcttatctttagctctcacaattttctaacaaatggattcatcaccagacgaaatccttatagaaatcccgcacatcattcgcgtctacaaagatggtcgggtcgttaaactcaatggcaccaatgttgtcccagccggtattgatccgagcacgggcgttcaatctaaagacgtcgttatctcacccggaagaaatggttttgttaggatttacattcctaagactgcaaattcgaatgtaaaaaaactcccacttttggtttacttccatggcggcgcttttataatcgaaacagccgcctcacctacgtaccataacttccttaacctcgtatcatccgaatctgacgttgttgtagtgtccgtggactataggaatgcgcccgagcatcccgtccccgcttgttttgatgattcatgggaagcagtcaagtgggtcgcacaacgtgttaatggaaatggacccgatacgtggctaaacgattgcacggattctagccatgtgtttttcgccggagatagcacgggtggtaatatagctcaccatatggcaatcagggttggttcagacaatttgggtcgggtttcaggtgaaagtttgaatcttgagggtattatattgctccacccgtacttttggggggaagataggatgggttcggagtcggattctccatggaccaaagcagttaaagaattatggctaattgcccatcctgggacaagcgggttagatgacccgctgattaacccggataaggattcgaaggtgtcggatcttagttgctctagggtacttgtttgtgttgctgggaaggatttattgaaggataggggaatttactataaggttattttgggtaaaaatggatggaacggtgacatagaggttatcgaggataaagaggaggatcatgtgtttttcctaaatagtcctcttgctgaaatctcttgcaccttgcgcaagaggatttgtactttcatcaacaactagaagagatcatgctcatcacgttaaaataaaataatatgatatggtttcaggttttgttctaaaaaaaaaaaaaaaaaa

SEQ ID NO: 239 - protein, 320 aa, Artemisia tridentata
MDSSPDEILIEIPHIIRVYKDGRVVKLNGTNVVPAGIDPSTGVQSKDVVISPGRNGFVRIYIPKTANSNVKKLPLLVYFHGGAFIIETAASPTYHNFLNLVSSESDVVVVSVDYRNAPEHPVPACFDDSWEAVKWVAQRVNGNGPDTWLNDCTDSSHVFFAGDSTGGNIAHHMAIRVGSDNLGRVSGESLNLEGIILLHPYFWGEDRMGSESDSPWTKAVKELWLIAHPGTSGLDDPLINPDKDSKVSDLSCSRVLVCVAGKDLLKDRGIYYKVILGKNGWNGDIEVIEDKEEDHVFFLNSPLAEISCTLRKRICTFINN

SEQ ID NO: 240 - DNA, 958 bp, Artemisia tridentata
gatctgcttcatctatttcatcccacatctatctatcatagttttcataaaagaaaaatgtcttcatcgaccgaaaccgagaccacccatgatttcgcgccgtttttacgtgtatacaaagatggacgtgtcgaacgtttgctcacaacaccccgtttgccaccctccaccgatcctataaccggtgttcaatccaaagacgttgttatatcacccgatatcgatgtgaaaacccgaatattcctccctaaaatggacgaactggatgcatccaaaaagcttcctctgatcatttatgtgcatggtggggggttttgtattgggtcacctataaatattgtgacacaagggtttttgactccctttgtttcccaaactccagctgtcgcgatagccgtggggtacaggttggcacctgagagtgctggagcgaatcttgctcattacttagcggtccaagctggagttaataaaattgggttagggattcgtgggttaattacattgcatccgtattttgctcaaaaggagcctgataagttgattaagtatttgtacccgggtagttctgggtcaaatgatgactcaaaactttacccgggtgcagatccggatcttgagaaatttagttgccccaaggtattgatagtggttgctgaaaaagactttttgaagccgcgaggcattgattataaagagacgttagaaaaaagtaaatggggagggagtattgagtttatggagaatgaaggtgaaggtcattgcttttatttgtttgatccatctagtgaaaaggccaagggtctaattcaaaggttgatttcttatgtaaatcagtgatttagtggtatgtttgtcatttttattttgtgggtcgaactagtaataaatttatcaaattattagagttatgaaataaatgaatgaaatcatttgactaaaaaaaaaaaaaaaaaaa

SEQ ID NO: 241 - protein, 260 aa, Artemisia tridentata
MSSSTETETTHDFAPFLRVYKDGRVERLLTTPRLPPSTDPITGVQSKDVVISPDIDVKTRIFLPKMDELDASKKLPLIIYVHGGGFCIGSPINIVTQGFLTPFVSQTPAVAIAVGYRLAPESAGANLAHYLAVQAGVNKIGLGIRGLITLHPYFAQKEPDKLIKYLYPGSSGSNDDSKLYPGADPDLEKFSCPKVLIVVAEKDFLKPRGIDYKETLEKSKWGGSIEFMENEGEGHCFYLFDPSSEKAKGLIQRLISYVNQ

SEQ ID NO: 242 - DNA, 886 bp, Artemisia tridentata
gatcccacatctatctatcatagttttcataaaagaaaaatgtcttcatcgaccgaaaccgagaccacccatgatttcgcgccgtttttacgtgtatacaaagatggacgtgtcgaacgtttgctcacaacaccccggttgccaccctccaccgatcctataaccggtgttcaatccaaagacgttgttatatcacccgatatcgatgtgaaaacccgaatattcctccccatcgcgtacgacgattgttgggccgtgttccaatggatcacggcccatgctaatgggtctgggcccgactcatggattaatgattatgtggacatgagtcgggtttatttgatgggagagagtgctggagcgaatcttgctcattacttagcggtccaagctggagttaataaaattgggttagggattcgtgggttgattacattgcatccgtattttgctcaaaaggagcctgataagttgattaagtatttgtacccgggtagttctgggccaaatgatgacccaaaactttacccgggtgcagatccggatcttgagaaatttagttgccccaaggtattgatagtggttgctgaaaaagactttttgaagccgcgaggcattgattataaagagacgttagaaaaaagtaaatggggagggagtattgagtttatggagaatgaaggtgaaggtcattgcttttatttgtttgatccatctagtgaaaaggccaagggtctaattcaaaggttgatttcttatgtgaatcagtgatttagtggtatgtttgtcatttttattttgtgggtcgaactagtaataaatttatcaaattattagagttatgaaatgaatgaatgaaatcatttgattaaaaaaaaaaaaaaaa

SEQ ID NO: 243 - protein, 243 aa, Artemisia tridentata
MSSSTETETTHDFAPFLRVYKDGRVERLLTTPRLPPSTDPITGVQSKDVVISPDIDVKTRIFLPIAYDDCWAVFQWITAHANGSGPDSWINDYVDMSRVYLMGESAGANLAHYLAVQAGVNKIGLGIRGLITLHPYFAQKEPDKLIKYLYPGSSGPNDDPKLYPGADPDLEKFSCPKVLIVVAEKDFLKPRGIDYKETLEKSKWGGSIEFMENEGEGHCFYLFDPSSEKAKGLIQRLISYVNQ

SEQ ID NO: 244 - DNA, 1186 bp, Artemisia tridentata
ggcataacgttataaaaggcacgccctaacctaagaagccaaacttctcattacattttcaacatggatacgtctgcaaatgaaatcgtaagagaaatccctggcgccattcgtatattcaaagatggcacatgtcatagactacgtgtcaccaacatcgtaccagcaggaaccgatcctgcgaccgcagtcgaatccaaagacatcatattttcacccgaaaacaacatctttgctagaatttacatcccaccaaataaaacctcggaccataaatccaacagactcccacttattatcttctaccatgggggcggattttgtatcgaatccgccagatcatctctctaccataactttcttaacctagttgtctcagaatccaacgttgtggccgtgtctgtagactatcgactcgcgcccgagtttccacttcctgtcgcgtatgaggactcgtgggacgcgatcaaatgggtcgggaaacatgtaaatggaaatggtcctgagtcatggttaaatgaatacgctgattttaaaaatgttttcctagcaggtgatagtgctggaggtaatatagcacatcatatggctatacgggttgggtcaagttgtcctgatgggttagagtttaagggtgttattttgctccacccgtatttttggggaaaagaacggattggtaacgagtcaaaatggatagaatccatgattaagaatttggataccgtatgggctattgtgagcccaggaggcagcgggtcagatgacccgttgattaacccggaaatggatccgagaattgcgggtatgggctgctccaggatgttggtttgtatagctggtaatgattttatgagggatagaggttggaactatacaaaaattgttgagaaaagtggttggaatggtgatttggaggtagttgaggacaaaggtgaagaacatgtgtttttcctaaataagcctgattgtgcaaacgcttgtttattgcgcactaggatttgtactttcatcagtaagacttaagaaaatgtgttcggcgttaaattttcacatcatcgtatgtttaagttaaactttatgaagttacaggttgtaattagtatgttatgtgttatgaaaaaatgtataacctacaacaacaaaggcacacctgcttgtatataaaaaaaaaaaaaaaaaaaaa

SEQ ID NO: 245 - protein, 320 aa, Artemisia tridentata
MDTSANEIVREIPGAIRIFKDGTCHRLRVTNIVPAGTDPATAVESKDIIFSPENNIFARIYIPPNKTSDHKSNRLPLIIFYHGGGFCIESARSSLYHNFLNLVVSESNVVAVSVDYRLAPEFPLPVAYEDSWDAIKWVGKHVNGNGPESWLNEYADFKNVFLAGDSAGGNIAHHMAIRVGSSCPDGLEFKGVILLHPYFWGKERIGNESKWIESMIKNLDTVWAIVSPGGSGSDDPLINPEMDPRIAGMGCSRMLVCIAGNDFMRDRGWNYTKIVEKSGWNGDLEVVEDKGEEHVFFLNKPDCANACLLRTRICTFISKT

SEQ ID NO: 246 - DNA, 1236 bp, Artemisia tridentata
gaacctaagaagccaaacttctcattacattttcaacatggatacgtctgcaaatgaaatcgtaagagaaatccctggcgccattcgtatattcaaagatggtacatgtcatagactacgtgtcaccaacatcgtaccagcaggaaccgatcctacgaccgcagtcgaatccaaagacatcatattttcacccgaaaacaacatctttgctagaatttacatcccaccaaataaaacctcggaccataaatccaacagactcccacttattatcttctaccatgggggcggattttgtatcgaatccgccagatcatctctctaccataactttcttaacctagtcgtctcagaatccaacgttgtggccgtgtctgtagactatcgactcgcgcccgagtttccacttcctgtcgcgtatgaggactcgtgggacgcgatcaaatgggtcgggaaacatgtaaatggaaatggtcctgagtcatggttaaatgaatacgctgattttaaaaatgttttcctagcaggtgatagtgctggaggtaatatagcacatcatatggctatacgggttgggtcaagttgtcctgatgggttagagtttaagggtgttattttgctccacccgtatttttggggaaaagaacggattggtaacgagtcaaaatggatagaatccatgattaagaatttggataccgtatgggctattgtgagcccaggaggcagcgggtcagacgacccgttgattaacccggaaatggatccgagaattgcgggtatgggctgctccaggatgttggtttgtatagctggtaatgattttatgagggatagagattggaactatacaaaaattgttgagaaaagtggttggaacggtgatttggaggtagttgaggacagaggtgaagaacatgtgtttttcctaaataagcctgattgtgcaaacgcttgtttattgcgcactaggatttgtactttcatcagtaagacttaagaaaatgtgttcggcgttaaattttcatatcatcgtatgtttaagttaaactttatgaagttacaggttgtaattagtatgttatgtgttatgaaaaaatgtataacctacaacaacaaaggcacacctgcttgaatataaaactaaactctcgtgtctgtttgagctctaaaaaaaaaaaaaaaaaaaaaaaaaaaaaaaaaaaaaaaaaaaaaaaaaaaaaaaaaaaaaaaaaa

SEQ ID NO: 247 - protein, 320 aa, Artemisia tridentata
MDTSANEIVREIPGAIRIFKDGTCHRLRVTNIVPAGTDPTTAVESKDIIFSPENNIFARIYIPPNKTSDHKSNRLPLIIFYHGGGFCIESARSSLYHNFLNLVVSESNVVAVSVDYRLAPEFPLPVAYEDSWDAIKWVGKHVNGNGPESWLNEYADFKNVFLAGDSAGGNIAHHMAIRVGSSCPDGLEFKGVILLHPYFWGKERIGNESKWIESMIKNLDTVWAIVSPGGSGSDDPLINPEMDPRIAGMGCSRMLVCIAGNDFMRDRDWNYTKIVEKSGWNGDLEVVEDRGEEHVFFLNKPDCANACLLRTRICTFISKT

SEQ ID NO: 248 - DNA, 1116 bp, Artemisia tridentata
gaacaaacattacaaagaaaaatgccttctacttctgctccaggaaagttagcaacatccgacatatttcccatccaacttcgtttttttcttaaagtacacgaagatggtcgatgtgaaagatttgtcgggacgactatcttagcatcgggtgtcgatcctttaaccggagttcattctaaagatattgtcatctcacccgaaaccaacctaagtgcaagaatttacattcccaaaaatgctacaacgggccgtagattgcctatattgatttattatcatggtggggggtttgtagtcgactccccaaggtctactacttatcaacctacgttaaaccttctaactgcggagtcagatgtagtcattgttgccattgactacaggttggctccggaatatccaatacctattggatataacgactcttgggaagcaatcaagtggattgctacccattctaagggcagtggacccgaagcgtggttaaatgattacggtgattttgagaaagttttctttattggagatagtgccggcgcgaatatagctcataacatggcaattcgggccgggctagaacctattaaagaactaaatttagaaggtcttattctactcaacccttattttggaggaaacgaccccattggattggaatgtggaaagaataaggagcttaaaggttttactgatgagttttggttgttcgcgaatccatcagggagtgggctagatgacccgctgtttaatccggctaagaacccgaatctttcggctttgggctgctctaggatctttgtttctgttgctgaatatgatacatttggggacaggggttttctttacaaggaattaatggaaaaaagtggatggaatggaaaatttgagtttacggagacgaaaaatgagaatcatgtgttctttttgtttgatacttcttgtgacaatgcatgtaacttgcgtgacactgtttgtaagttcatcaatcgctctcaaaattaaatagtcattagtaataattgtatttgattttccgttcttgcagaacaaattgttgttatattgtgtgtttgtgatatgaatatactaaataaattttatttcgaaaaaaaa

SEQ ID NO: 249 - protein, 327 aa, Artemisia tridentata
MPSTSAPGKLATSDIFPIQLRFFLKVHEDGRCERFVGTTILASGVDPLTGVHSKDIVISPETNLSARIYIPKNATTGRRLPILIYYHGGGFVVDSPRSTTYQPTLNLLTAESDVVIVAIDYRLAPEYPIPIGYNDSWEAIKWIATHSKGSGPEAWLNDYGDFEKVFFIGDSAGANIAHNMAIRAGLEPIKELNLEGLILLNPYFGGNDPIGLECGKNKELKGFTDEFWLFANPSGSGLDDPLFNPAKNPNLSALGCSRIFVSVAEYDTFGDRGFLYKELMEKSGWNGKFEFTETKNENHVFFLFDTSCDNACNLRDTVCKFINRSQN

SEQ ID NO: 250 - DNA, 1126 bp, Artemisia tridentata
gaacaaacattacaaagaaaaatgccttctacttctgctccagggaagttagcaacatccgacatatttcccatccaacttcgtttttttcttaaagtacacgaagatggtcgatgtgaaagatttgtcgggacgactatcttaccatcgggtgtcgatcctttaaccggagttcattctaaagatattgtcatctcacccgaaaccaacctcagtgcaagaatttacattcccaaaaatgctacaacgggccgtagattgcctatattgatttattatcatggtggggggtttgtagtcgactccccaaggtctactacttatcaacctacgttaaaccttctaactgcggagtcagatgtagtcattgttgctattgactacaggttagctccggaatatccaatacctattggatattacgactcttgggaagcaatcaagtggattgctacccattctaagggcagtggacccgaagcgtggttaaatgattacggtgattttgagaaagttttcattattggagatagtgccggcgcgaatatagctcataacatggcaattcgggccgggctagaacctattaaagaactaaatttagaaggtctcattctactcaacccttattttggaggaaacgaccccattggattggaatgtggaaagaataaggagcttaaaggttttactgatgagttttggttgttcgcgaatccatcagggagtgggctagatgacccgctgtttaatccggctaagaacccgaatctttcggcttttggctgctctaggatctttgtttctgttgctgaatatgatacatttagggacaggggttttctttacaaggaaataatggaaaaaagtggatggaatggaaaattggagtttacggagacaaaaaatgagaatcatgtgttctttttgtttgacacttcttgtgacaatgcatgtaacttgcgcgacactgtttgtacgttcatcaatcggtctcaaaattaaatagtctttagtaataattgtatttgattttccgttcttgcagaacaaattgttgttatattgtgtttttgtgatatgaatatactaaataaattgtatttttgtttaaaaaaaaaaaaaa

SEQ ID NO: 251 - protein, 327 aa, Artemisia tridentata
MPSTSAPGKLATSDIFPIQLRFFLKVHEDGRCERFVGTTILPSGVDPLTGVHSKDIVISPETNLSARIYIPKNATTGRRLPILIYYHGGGFVVDSPRSTTYQPTLNLLTAESDVVIVAIDYRLAPEYPIPIGYYDSWEAIKWIATHSKGSGPEAWLNDYGDFEKVFIIGDSAGANIAHNMAIRAGLEPIKELNLEGLILLNPYFGGNDPIGLECGKNKELKGFTDEFWLFANPSGSGLDDPLFNPAKNPNLSAFGCSRIFVSVAEYDTFRDRGFLYKEIMEKSGWNGKLEFTETKNENHVFFLFDTSCDNACNLRDTVCTFINRSQN

SEQ ID NO: 252 - DNA, 1282 bp, Artemisia tridentata
ggatcttagatagtcacatagaaatgttttctgtttctccgtcgacatacatatcaacctccgaagaagttccactcgaaattcgtggatggtgtcgaattcacaaagacggtcggtttgaaagattggctggaactactacggtccctgctggtcctgatcctttaaccggtgttcaatcaaaagatgtcctcatttcatcaaaaaacaacgtttctgttagaatttacatccctaaattcgctacctcgaatgagaaactccccacacttatatatattcatggaggcgggttcatgatagaatctgccacctcttcaacataccatccgacacttaacttgatcagtagagaatctaatgtcattgcaatatcggttgactacagactagcgccagaatatcctatcccagctatgtacgaggattcatgggaagcgatcagatgggttgcttcccatgattcaggacatggtcctgacaagtggttaaacgactatgctgatcttaaaaatgtgtttctaggtggtgatagtgtgggggctaatattgcccacaatatggctattcgggttggattaaaccttaatgttgttagtaaaatcgagctcaagggcctaattttgcttcacccatttttcaatggggaggaacctattgaaccaaagacgaggaaagatagagagtttgaagcggccaaggactatttgtggaacttggtaaacccaaaggggatcggacgggatgacccgctgtttaacccgggcactgacctgaatgtttcgggcttaagatgctctaagatacttgtgtgtattggtgagaaggataagttgaggggtatgggtttgtattacaaaaaagtgatgcaaaaaagtggatggataggaagagttgatgttatggagagcaaaggggagggtcatgtgttttttttgcataacacttcaagtgaaaattcttgcacattgcgcaagtggatatgcatcttcatcaatcctattcgtagtaaagcctaaaagttgcatcgagaggatgtactattatactaatgcactatatcactttattagaacatatggatcccggactcccaatattgtccctggatactgtcgacagttccgacatgtattttcgtttattttatgcaacattatggttattgtataaacaaacttatgcccagaatctatataaggatcaagtggtcaacattttgagaatttttgttttcgaaactgaaatttaagaagttgaggtttacgaaaaaaaaaaaaaa

SEQ ID NO: 253 - protein, 331 aa, Artemisia tridentata
MFSVSPSTYISTSEEVPLEIRGWCRIHKDGRFERLAGTTTVPAGPDPLTGVQSKDVLISSKNNVSVRIYIPKFATSNEKLPTLIYIHGGGFMIESATSSTYHPTLNLISRESNVIAISVDYRLAPEYPIPAMYEDSWEAIRWVASHDSGHGPDKWLNDYADLKNVFLGGDSVGANIAHNMAIRVGLNLNVVSKIELKGLILLHPFFNGEEPIEPKTRKDREFEAAKDYLWNLVNPKGIGRDDPLFNPGTDLNVSGLRCSKILVCIGEKDKLRGMGLYYKKVMQKSGWIGRVDVMESKGEGHVFFLHNTSSENSCTLRKWICIFINPIRSKA

SEQ ID NO: 254 - DNA, 1250 bp, Artemisia tridentata
gatgttgtacggcattaaatctctgaccaatcagagaagagacgcgtttgaaaattaatcagagaagagacgcgtttgaaaattaattgcattggataagtattcatgtttttggatgtgatagaataattagcttttgtctcccactattatctccacatggatccatcatcatcatcggatcaaatcatcaaagaaatccccgaattcatcagagtctacaaagacggcagcttccttaaactcgggggcacagatgatgtctccgcgggccttgacccttccacgggcgttcaatctaaagatgtcgttatttcacacgaaacaaacgtttttgttaggatttatattcctgaaaaaaccagcaactcgaacataaagaaactcccacttttaatttactttcatggtggcggtttcataattgaaacagctgcctcacccacgtaccataacttccttaacctcgcatcatccgaatccaacgttgttgtagtgtccgtcgactgtaggacagcccctgagcatcctatcccgacttgttatgatgattcatgggaagcaatcaaatgggtcgctcaacatgttaatggaaatggagccgatacgtggcttaacgagtatccggattttagtcgcgtgtttttcgggggagatagtgctggtggaaatattgcacatcatatgggtattcgggctgggacggggacttcgggtcgggttgtgaaccttgagggtgttattttgttacacccgtttttttggggggaggaacggatcggggtggagttgggtgagcacccgtggaaggaaaccgcgggtgaggtatggatgtttgcttatccaggaaccagcgggttagatgacccgctgattaacccggacaaagatccaaaagtgtcggatcttggatgctctagggtacttgtttgtgttgctgggaatgatataggaaaagatagaggattctattataaggatattttgggtaaaaatggatggaaaggtgacattgaggttattgaggataaaggagaggatcatgtgtttttcttaatcaacccttcttgtgataatgcttcttccttgcgcaagagaatttctacttttattaatcaagtcaagtcctaggacaagtcatggtacaacaagataacaaatgctctagcagtttaaactgtaacgatatgattgtgttatattacatataaataaataaatcaatgttttcaaaaaaaaaaaaaaaaaaa

SEQ ID NO: 255 - protein, 323 aa, Artemisia tridentata
MDPSSSSDQIIKEIPEFIRVYKDGSFLKLGGTDDVSAGLDPSTGVQSKDVVISHETNVFVRIYIPEKTSNSNIKKLPLLIYFHGGGFIIETAASPTYHNFLNLASSESNVVVVSVDCRTAPEHPIPTCYDDSWEAIKWVAQHVNGNGADTWLNEYPDFSRVFFGGDSAGGNIAHHMGIRAGTGTSGRVVNLEGVILLHPFFWGEERIGVELGEHPWKETAGEVWMFAYPGTSGLDDPLINPDKDPKVSDLGCSRVLVCVAGNDIGKDRGFYYKDILGKNGWKGDIEVIEDKGEDHVFFLINPSCDNASSLRKRISTFINQVKS

SEQ ID NO: 256 - DNA, 1195 bp, Artemisia tridentata
gacgccctaacctaagaagccaaacttctcattacattttcaacatggatacgtctgcaaatgaaatcgtaagagaaatccctggcgccattcgtatattcaaagatggcacatgtcatagactacgtgtcaccaacatcgtaccagcaggaaccgatcctacgaccgccgtcgaatccaaagacatcatattttcacccgaaaacaacatctttgctagaatttacatcccaccaaataaaacctcggaccataaatccaacagactcccacttattatcttctaccacgggggcggattttgtatcgaatccgccagatcatctctctaccataactttcttaacctagttgtctcagaatccaacgttgtggccgtgtctgtagactatcgattcgcgcccgagtttccacttcctgtcgcgtatgaggactcgtgggacgcgatcaaatgggtcgggaaacatgtaaatggaaatggtcctgagtcatggttaaatgaatacgctgattttaaaaatgttttcctagcaggtgatagtgctggaggtaatatagcacatcatatggctatacgggttgggtcaagttgtcctgatgggttagagtttaagggtgttattttgctccacccgtatttttggggaaaagaacggattggtaacgagtcaaaatggatagaatccatgattaagaatttggataccgtatgggctattgtgagcccaggaggcagcgggtcagatgacccgttgattaacccggaaatggatccgagaattgcgggtatgggctgctccaggatgttggtttgtatagctggtaatgattttatgagggatagagattggaactatacaaaaattgttgagaaaagtggttggaatggtgatttggaggtagttgaggacaaaggtgaagaacatgtgttcttcctaaataagcctgattgtgcaaacgcttgtttattgcgcactaggatttgtactttcatcagtaagacttaagaaaatgtgttcggcgttaaattttcatatcatcgtatgtttaagttaaactttatgaagttacaggttgtaattagtatgttatgtgttatgaaaaaatgtataacctacaacaacaaaggcacacctgcttgaatataaaactaaactctcgtgtttgtttgagctccaaaaaaaaaaaaaaaaaa

SEQ ID NO: 257 - protein, 320 aa, Artemisia tridentata
MDTSANEIVREIPGAIRIFKDGTCHRLRVTNIVPAGTDPTTAVESKDIIFSPENNIFARIYIPPNKTSDHKSNRLPLIIFYHGGGFCIESARSSLYHNFLNLVVSESNVVAVSVDYRFAPEFPLPVAYEDSWDAIKWVGKHVNGNGPESWLNEYADFKNVFLAGDSAGGNIAHHMAIRVGSSCPDGLEFKGVILLHPYFWGKERIGNESKWIESMIKNLDTVWAIVSPGGSGSDDPLINPEMDPRIAGMGCSRMLVCIAGNDFMRDRDWNYTKIVEKSGWNGDLEVVEDKGEEHVFFLNKPDCANACLLRTRICTFISKT

SEQ ID NO: 258 - DNA, 1128 bp, Artemisia tridentata
gaacaaacattacaaagaaaaatgccttctacttctgctccaggaaagttagcaacatccgacatatttcccatccaacttcgtttttttcttaaagtacacgaagatggtcgatgtgaaagatttgtcgggacgactatcttaccatcgggtgtcgatcctttaaccggagtccattctaaagacgttgtcatctcacccgaaaccaacctcaatgcaagaatttacattccgaaaaatgctacaacaggccgtagattgcctatattgatttattatcatggtggggggtttgtagtcgactccccaaggtctactacttatcaacctacgttaaaccttctaactgcggagtcagatgtagtcattgttgctattgactacaggctggctccggaatatccaatacctattggatataaagactcttgggaagcaatcaagtggattgctacccattccaagggcagtggacccgaagcgtggttaaatgattatgctgattttgagaaagttttctttattggagatagtgccggcgcgaatatagctcataacatggcaattcgggccgggctagaacctattaaagaactaaacttagaaggtcttattctactcaacccttattttggaggaaacgaccccattggattggaatgtggaaagaataaggggcttaaaggttatactgatgagttttggttattcgcgaatccatcaaagagtgggttagatgacccgttgtttaaccccggaaagaacccgaatctttcggctttgggctgctctaggatctttgtttctgttgctgaatatgatacatttagggacaggggttttctttacaaggaattaatggaaaaaagtggatggagtggaaaattggagtttacggagacgaaaaatgagaatcatgtgttctttttgtttgatacttcttgtggcaatgcatgtaacttgcgtgacactgttcgtaagttcatcaatcgttctcaaaattaaatagtctttagtaataattgtatttgattttccgttcttgcagaactaattgttgttatattgtgtgttttgtgatatgaatatactaaataaattgcatttttgtctaaaaaaaaaaaaaaa

SEQ ID NO: 259 - protein, 327 aa, Artemisia tridentata
MPSTSAPGKLATSDIFPIQLRFFLKVHEDGRCERFVGTTILPSGVDPLTGVHSKDVVISPETNLNARIYIPKNATTGRRLPILIYYHGGGFVVDSPRSTTYQPTLNLLTAESDVVIVAIDYRLAPEYPIPIGYKDSWEAIKWIATHSKGSGPEAWLNDYADFEKVFFIGDSAGANIAHNMAIRAGLEPIKELNLEGLILLNPYFGGNDPIGLECGKNKGLKGYTDEFWLFANPSKSGLDDPLFNPGKNPNLSALGCSRIFVSVAEYDTFRDRGFLYKELMEKSGWSGKLEFTETKNENHVFFLFDTSCGNACNLRDTVRKFINRSQN

SEQ ID NO: 260 - DNA, 1158 bp, Canna x generalis
ttgtccttggtccactataattacaagcatattttacagagagggagagagagagagagagagagagagatgagcaccagcctcttgctccgaatcgttcaacacggcgacggctccgtcgaccgtccttacgtgccgatcacttcgcccaccggcgagcagtccgaggcacccgtcctctccaaagacgtcccccttaatcccgccaataaaacatggctccggatcttccgccccaacaccaccctccctaattcccaccaaaagctccccataatcatctacttccacggcggcggcttcgtcgtcttcagcgctgccgcctgcttctaccacacctactgcgagaccatggccagagtagttcccgctctggtcgtttccctcgagtaccgccttgctccggagcatcgcctccctgcggcctacgaggacgccgccgaggcgttggtctggcttcaatcccaagctcgggtcgtggcgacgagagagccgtggcttagcgacggggacttctcccgctgctttctgatgggcagcagctccggggcgaacatggcgtaccgcgcagggctgctcgccgcggctctggagctgccgcccttgaggctgccggggctaatcttcgaccagccgtacttcggtggggaagagaggactccgtcggagatgagatccgaagacgacatcgtcatcccgctccgggcgaacgacctgctgtggcggctggcgctgccgaaaggcgcggatagagaccacgagttttgcaacccggcggtggcggtgccgcgggagctccggcgtctgccgaggtgcttggtgacgggatacgaaggggatccgctggtggatcggcagcgaatgttcgcggagatgttggagagagaaggagcgagcgtggtggctgaggtggaggagggagggttccatggcatcgagctggtcattccggagaaggcggaggcactgttcgtcaaagtccggcacttcattttcaacgcttgttaattcaatttactttaactttaattattgtgtgaataaaaagattgcgtggaattgtggaaatgttgacttgtgccaacattaattcgattaaaaatatatcaaaataagcttgaaatcaaattcaatcaaaaaaaaaaaaaaaaaaaaaaa

SEQ ID NO: 261 - protein, 312 aa, Canna x generalis
MSTSLLLRIVQHGDGSVDRPYVPITSPTGEQSEAPVLSKDVPLNPANKTWLRIFRPNTTLPNSHQKLPIIIYFHGGGFVVFSAAACFYHTYCETMARVVPALVVSLEYRLAPEHRLPAAYEDAAEALVWLQSQARVVATREPWLSDGDFSRCFLMGSSSGANMAYRAGLLAAALELPPLRLPGLIFDQPYFGGEERTPSEMRSEDDIVIPLRANDLLWRLALPKGADRDHEFCNPAVAVPRELRRLPRCLVTGYEGDPLVDRQRMFAEMLEREGASVVAEVEEGGFHGIELVIPEKAEALFVKVRHFIFNAC

SEQ ID NO: 262 - DNA, 1271 bp, Canna x generalis
gagagagagagatgagcaccagcctcttgctccgaatcgttcaacacgacgacggctccgtcgaccgtccttacgtgccgatcacttcgcccaccggcgagcagtccgaggcacccgtcctctccaaagacgtcccccttaatcccgccaataaaacatggctccggatcttccgccccatcaccatcctccctaattcccaccaaaagctccccataatcatctacttccacggcggcggcttcgtcgtcttcagcgctgccgcctgcttctaccacacctactgcgagaccatggccagagtagttcccgctctggtcgtttccctcgagtaccgccttgctccggagcatcgcctccctgcggcctacgaggacgccgccgaggcgttggtctggcttcaatcccaagctcgggccgtggcgacgagagagccgtggcttagcgacggggacttctcccgctgctttctgatgggcagcagctccggggcgaacatggcgtaccgcgcagggctgctcgccgcggctctggagctgccgcccttgaggctgccggggctgatcttcgaccagccgtatttcggtggggaagagaggactccgtcggagatgagatccgaagacgacatcgtcatcccgctccaggcgaacgacctgctgtggcggctggcgctgccgaaaggcgcggatagaggccacgagttttgcaacccggcggtggcggtgccgctggagctccggcgtctgccgaggtgcttggtgacgggatacgaaggggatccgctggtggatcggcagcgaatgttcgcggagatgttggagagagaaggagcgagcgtggtggctgaggtggaggagggagggttccatggcatcgagctggtcattccggagaaggcggaggcactgttcgtcaaagtccggcacttcattttcaacgcttgttaattcaatttactttaactttaattattgtgtgaataaaaagattgcgtggaattgaggaaatgttgacttgtgccaacattaattcgattaagaatatatatcataataagcttgaaatcaaattcaacaaaactggtgaacccacttatatgttaagtggtaatagcattcggatatattgattattaattttgggtttaatttttaattatagtattttgtgcatttttttaatatttttgtacgttttgtaatatattttgtatgtttattatcatgttcaagttttgtaacgacgaaaaaaaaaaaaaaaaaaaaaaa

SEQ ID NO: 263 - protein, 312 aa, Canna x generalis
MSTSLLLRIVQHDDGSVDRPYVPITSPTGEQSEAPVLSKDVPLNPANKTWLRIFRPITILPNSHQKLPIIIYFHGGGFVVFSAAACFYHTYCETMARVVPALVVSLEYRLAPEHRLPAAYEDAAEALVWLQSQARAVATREPWLSDGDFSRCFLMGSSSGANMAYRAGLLAAALELPPLRLPGLIFDQPYFGGEERTPSEMRSEDDIVIPLQANDLLWRLALPKGADRGHEFCNPAVAVPLELRRLPRCLVTGYEGDPLVDRQRMFAEMLEREGASVVAEVEEGGFHGIELVIPEKAEALFVKVRHFIFNAC

SEQ ID NO: 264 - DNA, 1385 bp, Chlorophytum comosum
acagcaacccctctcctccctcaacctccgagtcatggatccctacaaacacctccaaatctctcccaaccccgacggctccctcacccgccacgccttcatccccaccagcgacctcccacctccggtcacctcctccacccccgccgccctctttagagacgttaccctcaaccccacaaacaacacctggatccgcgtctacactcccgtgattcaagactcgtcgacaaagctccctatcatcttctacttccacggcggcggcttcatcatgggcagcacggccacagatttcagccacgcgttaaccctcgacaaggccgccaatatcccctccatcatcctctccgtcgagtaccgcctcgcccccgagcaccgcctcccggccgcctatgacgacgccgtcgacgccctcctctggctccgcgaccagggcgctgacgatccgtggctgagggaccgagccgacttctccaagtgcttcctcatgggccccagcgctggcgccaacatcgcttaccttgttggcctgcggttgttggacctcgacatcacgccggtgagcatcgagggactgatcctgaaccagccgttcttcggcggcgtggagaggacggagtccgaggcggcgtcggagaataacaaggtcatcccgctggcggcgagcgatctgatgtgggagctggcactgccggcaggggccggcagagaccacgagtactgtgacccgaggccgacgatggcgagggccaaggggctgcccaagtgtctggtcaaggggttcatcggagatccgctgtacgaccggcagagggagtttgcgagaatgctggaggaggaaggggtgagcgtggtggcgctgctggaggaagaagggtggcacgggatcgagatcatggacgcaagcaaagccaaggcgctgatcgaggactgcaggaggttcatctacggggatgacggtggcagttaattgttgttgaaagatgggtggtgaaataaagttgtgggcaggagattgataatactactaccctattgtctgcttgaaagcaggtagtcgattgtaacaagaaaaaagcttggaagtcaattcctttggttatggaccaaaaagtcccaagggagctctccgattgagatgtgtaatgtaacaaatatgtttaatgtttataaaagagggttgccgaagtcttgctgaaatgtaaacggaacgaggcgggtacagacactagtggttgacacccctagaatatcctcttgtaacagcagaaacaaaccaataggagccacatcgagcacatgtattccaataggcatgctctaagattcagcttctcgatatatttgatgaaccactacatctcaaaaaaaaaaaaaaaaaa

SEQ ID NO: 265 - protein, 312 aa, Chlorophytum comosum
MDPYKHLQISPNPDGSLTRHAFIPTSDLPPPVTSSTPAALFRDVTLNPTNNTWIRVYTPVIQDSSTKLPIIFYFHGGGFIMGSTATDFSHALTLDKAANIPSIILSVEYRLAPEHRLPAAYDDAVDALLWLRDQGADDPWLRDRADFSKCFLMGPSAGANIAYLVGLRLLDLDITPVSIEGLILNQPFFGGVERTESEAASENNKVIPLAASDLMWELALPAGAGRDHEYCDPRPTMARAKGLPKCLVKGFIGDPLYDRQREFARMLEEEGVSVVALLEEEGWHGIEIMDASKAKALIEDCRRFIYGDDGGS

SEQ ID NO: 266 - DNA, 1149 bp, Chlorophytum comosum
atgaactcacaacaaaccaaacacctcgatcaaatcgatggctggtgtcaataccaaagatgtaaccatcgacctcgtcaccaacctcacagcccgtctctacatcaagtcaggcacacctaccgcagcaaaactcccaatcctcctctacatctacggaggtgtattcaagcacaggtccgctaccgagtcatgctgggacaaccacctcatgtcactcacataccaggccaacctcctctgcgtctccatcaactaccgcctggctccaaggcgccgcctccctgctgcctacagggacgggtggactgccttcgagtgggtcacatccaaacaagaccgatggatagcaaatcacggagatttggactgtgttttcattgcaggggacagtgtcggggccaatatatgtcaccaagtggggctaactgcaggtgacaatggagtgagagttcggggtatggcattagtcgacccctacttctggggggagaaccctgtaatgtatgagactgccaaccagatagtacgagacacttttgatatggactgggagctcgcgatgccgacttacatttcatggaactttgactacccatggattaatccgttggctgataaggcaccggggctggatcgattggggtgcaacaagctgctggtttgtgtcgcgaaggaagatgttttgcgatggaggggggtggcgtactaccaggcggcggttagggctttggggagcaacagggtggagctccttgagtcggaaggagggcatgacttccatcttgttgttccagattgccccgaagcaatcaagcgggtgaggaagttggtgtggtttttcacgactgcctagttatcacaatggactatgtgacgggtattttaacatggcatcagagccatccaggtttaatttccacatgacgtacttgacaggtgttttaacatggtatcgagccatccaggttcgatttccattggaggtaggaggtacttgacaagtgtttcaacactaataagtatataagcctgtataaattatggtgtataaaatagttcgctgaatgctgtataaaatatggtgtaataattctgcttttaagctaacttctgttgaatggagtccttaaaaaaaaaaaaaaaaaa

SEQ ID NO: 267 - protein, 272 aa, Chlorophytum comosum
MAGVNTKDVTIDLVTNLTARLYIKSGTPTAAKLPILLYIYGGVFKHRSATESCWDNHLMSLTYQANLLCVSINYRLAPRRRLPAAYRDGWTAFEWVTSKQDRWIANHGDLDCVFIAGDSVGANICHQVGLTAGDNGVRVRGMALVDPYFWGENPVMYETANQIVRDTFDMDWELAMPTYISWNFDYPWINPLADKAPGLDRLGCNKLLVCVAKEDVLRWRGVAYYQAAVRALGSNRVELLESEGGHDFHLVVPDCPEAIKRVRKLVWFFTTA

SEQ ID NO: 268 - DNA, 1352 bp, Chlorophytum comosum
aagcaccagacactgcaaaatggatccagacactgaagtcattttctgttaccccaaactcttccgcgtctacaagaacggccacatcgagcgctcccccaacaccaccacggtcgtcccagcctccttcgactccaccaccggagtcacatccagagatgtcctgatcgactccataactggcgtctcagctcgaatctaccttccaaacacaacaaacgcgaagaagaaactcccaattctcttatacttccatggcggttcattctgcgtctactccgcctcgtcgccccaataccattccttcgcaaattccctcgcctccaaagctcaactactcgtcgtctccgtcagctaccgccttgccaccgagcagttgctacccactgcctatgaagactcgtggggtgctcttaattgggctcttgagtcggagtctgacgagtggcttgccaatcacggtgattttaatcgtgtgttcataggcggagacagtgctggagggaacattactcatcagatggggctccgggctggggatgaaatgatgaagattgaagggatggtgttgatacatccgttcttttggggggaaaaggtggttggttcagaaacgattgacagtaagaagaggggattcattaaaaaactgtggagggtggtgaacttgccggaggctggcgacaacattgatcacccctggatcaatccgatagctgaattggctcctagcttggcgggattgggatgtaagagggcaatgatctgtgtcgcagagaaggattggttggtggagagggggagggtgtactgcgaggaactgaaggcgaacgggtgggaaggggaggttgagctcgtcgcgtccaagggagagtcacacgacttccatctcaacgagccggactgtgaggaggccgtaaaacttatggccaaattggtggctttcttccgaaatactgaatcggttgaaagtgaggcagctcaatcatccagggtttatcgaaacaagccaattggctccaagtcaggatataatgtgtcaagcgaaacaataattcacatcaatattggagaacctaacaagctttcattatgcaaatatggactacaagcaaccaccaaaggcgaccttgaaatgaccaaggaaatgcataacgatctatgggatgttggaatgaggaagacaataagctctgttggaggtttgctgctggggttaatcttctgcttgctgcttctacagatgaaatttgtgtgagatttataattactatattttgactggtgtcattttgggcctgtttcacggttgtattttactgaaaataagcaccaaaaaaaaaaaaaaaaaa

SEQ ID NO: 269 - protein, 412 aa, Chlorophytum comosum
MDPDTEVIFCYPKLFRVYKNGHIERSPNTTTVVPASFDSTTGVTSRDVLIDSITGVSARIYLPNTTNAKKKLPILLYFHGGSFCVYSASSPQYHSFANSLASKAQLLVVSVSYRLATEQLLPTAYEDSWGALNWALESESDEWLANHGDFNRVFIGGDSAGGNITHQMGLRAGDEMMKIEGMVLIHPFFWGEKVVGSETIDSKKRGFIKKLWRVVNLPEAGDNIDHPWINPIAELAPSLAGLGCKRAMICVAEKDWLVERGRVYCEELKANGWEGEVELVASKGESHDFHLNEPDCEEAVKLMAKLVAFFRNTESVESEAAQSSRVYRNKPIGSKSGYNVSSETIIHINIGEPNKLSLCKYGLQATTKGDLEMTKEMHNDLWDVGMRKTISSVGGLLLGLIFCLLLLQMKFV

SEQ ID NO: 270 - DNA, 1404 bp, Delosperma nubigenum
aactcttaactctcaaccactacaaagaaaaagaaaactcaagaacaacaaaaaaaatccttctttagaaaagccatggattcaagcaagaataatgaaagggaaatactccatgatgtaccacccttacttcgtgtctacaaagacggccatgttgagaggttaatagaggctgttcctatcccagcatcgctcgacccagcaaccggtgtcgaatccaaagacatcaccatcttccctgaaaccggagtttccgtaaggctttacaagcctagctggctagtggagaacccgaaagccaaggttccggtcttggtgtattttcatggaggtggtttctgtatagagagcactttctctgccctttatcatccctaccttaatagccttgcttctcaggctcgaatcctcattgtctctgtcgagtatcgactaacccccgagcaccctcttcctgccgcgtatgatgactgttggggcgcactcaattgggttgtttcgcattccacgggtgactcctttggttcaagtgacagagaaccttggctcctagagaatgcagattttgctagcgtttatgtagcgggggacagtgcaggtggtaacatcgcccatcatgtagccttgcgagttgccaaccagggtttagccgatggttccattcaccgaatcaatggggtcattcttttccacccctacttctgggggagtgaccgcattggtgatgaagctactaagttaagtagccagccgaacccggctataggagaccaagtatggactatttcctgccccacgagcagcgggatggatgatccgctgatcaaccctgtcaatgacccgaccctgtcgaggctgggatgtgagaaggtgctgatattcgtggccgagaaggatttcttgagagacagagggttttattacaaggagatccttgagaagagtgggtggaaagggaaggttgaggtggtggaatcaaaaggggaggatcatgtcttttacctcttcaatccttcttctgcaaatgctgcagtagtgatgagcaaagtggtggattttctcaaccctgcaggtgcagatactggaaattagttactgatgacgaatatctcactcggttttctgtcgaaattctcctttgtacgaaaaaatttgcaagagttttgatgaaacaaacatagaagagatacagcggttggtcaccaaagcactcgagaaatttatatgaagtttatatgatcgaatatgtgttgctagacttggtactacaagattaagtgtaacattttttttcaacattacacaacccgatcactttatattatatcatcgaatgttagacgggtgtacctatgatttagcctaagatgaaactccttgttccgaaaaaaaaaaaaaaaaaaa

SEQ ID NO: 271 - protein, 338 aa, Delosperma nubigenum
MDSSKNNEREILHDVPPLLRVYKDGHVERLIEAVPIPASLDPATGVESKDITIFPETGVSVRLYKPSWLVENPKAKVPVLVYFHGGGFCIESTFSALYHPYLNSLASQARILIVSVEYRLTPEHPLPAAYDDCWGALNWVVSHSTGDSFGSSDREPWLLENADFASVYVAGDSAGGNIAHHVALRVANQGLADGSIHRINGVILFHPYFWGSDRIGDEATKLSSQPNPAIGDQVWTISCPTSSGMDDPLINPVNDPTLSRLGCEKVLIFVAEKDFLRDRGFYYKEILEKSGWKGKVEVVESKGEDHVFYLFNPSSANAAVVMSKVVDFLNPAGADTGN

SEQ ID NO: 272 - DNA, 1300 bp, Delosperma nubigenum
agcaatccccacaccaactgtatataaaaccgcccatcacacgcatctcccaccccgaactttcaaaatcaaaactatcaaatttcaacgaagatggccatggactcaagcgacatactccatgatctctccccattgcttcgtgtttacaaagacggccgtgttgagcgattaacagagttaactacggtccaaccatcgctagatccaacgactggtgtcgaatctaaagacatcacaattgacccaggaaccggagtttcagtgaggattttcaagccaagacaaatagtcgaaatcccgaaactgaaggttccggtcgtggtgtttttccacgggggcgggttttgtatagatagtccgttttgcccactttatcataactaccataacaaccttgcctccgaagctggaatccttatcgtctctgttgattatcggttagcccccgaacatcttctccccattgcttacgatgattgttgggacgcgctcaattgggtctattctcataccacggcggattctgctggatcaagtagtaacaaagaaccatggctcctagagaacgcggatttttctagaatcttcctagccggggatagtgcaggtgctaacattacccatcgtatggccatgcggattggagcccaaggactagcaaatggaaccattcataaagtcaatggcatcctattgtttcactcctacttttggggcaaaatccgaattggagatgagggtactaagttgagtaactatccatacccggatttagcagaccaagtatgggcagttttctgccccgagagcaccgggattgatgacccgtggatcaacccggctaatgacccgacactttcaaggctgggttgtgaaagggtgctgatattcgtggcggaaatggatttatttagagacagggggttttactacaaggaagttttggagaagagtgggtggcaggggaatgttgaggtggttgagtccctaggggaagatcatggatttcatctctacaaaactacttgtcctaatgctttggatattatggcaaaggttgttgatttcatcaactataatgggtaaaaaaaattgagatttagtgttactaattttgttgttgattttcttcctttggttgcgtatatttgtcgatttgtatgcattttttgcaagatttgtgatgaaaataagatttgaatgtatggaaataaaagaaggtgatgaatccaagttgttttcttctcttgtaaaaaaaaaaaaaaaaaaaaaaaaaaaaaaaaaaaaaaaaaaaaaa

SEQ ID NO: 273 - protein, 331 aa, Delosperma nubigenum
MAMDSSDILHDLSPLLRVYKDGRVERLTELTTVQPSLDPTTGVESKDITIDPGTGVSVRIFKPRQIVEIPKLKVPVVVFFHGGGFCIDSPFCPLYHNYHNNLASEAGILIVSVDYRLAPEHLLPIAYDDCWDALNWVYSHTTADSAGSSSNKEPWLLENADFSRIFLAGDSAGANITHRMAMRIGAQGLANGTIHKVNGILLFHSYFWGKIRIGDEGTKLSNYPYPDLADQVWAVFCPESTGIDDPWINPANDPTLSRLGCERVLIFVAEMDLFRDRGFYYKEVLEKSGWQGNVEVVESLGEDHGFHLYKTTCPNALDIMAKVVDFINYNG

SEQ ID NO: 274 - DNA, 1211 bp, Delosperma nubigenum
aaatcctacactaagcggtccaagccacccatcccaaatcacctacccccaaaactttcaaaacccgaaaagtcaaccaaaccaaaatatcccattttccatggattcaaccatgagttcaagcgacatactccacgatctcacacctctactccgtgtctacaaagacggccgagtcgagcgactagccgagtcacccacggtcccgccatcgctcgacccggcaaccggtgtcgagtccaaagacatcaccatccgccccgaaaccggagtttcggtgaggatttttaagcccgaccaggttgaaaacccgaaagagaaacttccgatattgatgtttttccatggtggtgggttttgtattgatagcgccttttgccctctttatcataattaccataatagcctcgctgctcaagctcgagttttgattgtctctgttgactatcggctagcccccgagcatgttctccctgttgcgtatgatgattgttgggatgctctcaattgggtcttttcccattctccaagttcctcttttggttcaagcaaccaagaaccatggctcctagagaatgcggatttttctagaatcttcctagccggggacagttcgggtgctaacatcacacatcatatagccttacgagtgggcaaccaaggattaggcaacggttcaatccataaaatcaatggcatcattctatttcactcctacttttggggcaaagaccgcattggtactgaggctactaaattgactaccgttccatacccgaatatatcggaacaagtatgggcggtggtctgccccgggagctccggcattgacgatccatggatcaacccggccactgacccgaccctgtcgagtttgggatgtgaaagggtgctgatattcgtggtggaaatggatagatatagagacagagggttttactacaaggaggtgttggagaagagtggatggcaggggaatgctgaggtggttgagtccctaggggaagatcatggatttcacctctacaaacctacttgtccaaatgctttggatgttatggcaaaggttgttcatttccttaacccttctgcttcaaacactgaaatctagtgctaattttgttgcttttctcccttgaattttgttgttcctcatacttacttattgtggttggagtatattaccaaaaaaaaaaaaaaaaaaaaaaaaa

SEQ ID NO: 275 - protein, 336 aa, Delosperma nubigenum
MDSTMSSSDILHDLTPLLRVYKDGRVERLAESPTVPPSLDPATGVESKDITIRPETGVSVRIFKPDQVENPKEKLPILMFFHGGGFCIDSAFCPLYHNYHNSLAAQARVLIVSVDYRLAPEHVLPVAYDDCWDALNWVFSHSPSSSFGSSNQEPWLLENADFSRIFLAGDSSGANITHHIALRVGNQGLGNGSIHKINGIILFHSYFWGKDRIGTEATKLTTVPYPNISEQVWAVVCPGSSGIDDPWINPATDPTLSSLGCERVLIFVVEMDRYRDRGFYYKEVLEKSGWQGNAEVVESLGEDHGFHLYKPTCPNALDVMAKVVHFLNPSASNTEI

SEQ ID NO: 276 - DNA, 1316 bp, Delosperma nubigenum
tactttactaaaatactccataaatcaaacacaattttgtggtctatacaaagtctttccatttaatatcatcttactagcttcttctatctccactctaggaaaatgggtgccatggtaattgatgaatttcatcaaattggtccaaaacccaactatgataatgaagattatctagttgaggagatagagggactaatcaaagtacataaaagtggatacgtagaaagatcccaagtcgtgccatgtgtcgacacttcattgtcagtgggacttggtgttactgcggaggatgtgtttattgataaggtcacaaatgtttgggcacgtatctatgttccaaactgcgacgggaatgtctttattgataagtttccggtactaatctattttcatggagggggtttttgtcttggttcggctgcatggaagtgttaccatgaatttcttggagaattatcatcccaatcgcgatgcttaattatgtccgtgaattatcggttggctccggaaagtccactcccggcggcgtacgaagatgggataaaggctcttatgtggttgaaaaaacaagcactttcccaatctagtgaatgttggtggacaagtcattgtgacttttctagcatattactaggtggggatagtgcgggtgccaatttggcctacaatgtggccttaaaacttggtacacctcaaataggatctctaaggcctttgaaaattcggggcataattttgatacaacctttttttggcggaaaagagaggactcatttcgaaaaattaatggtgcaatcacgtagatcagcattgagtttatcaatatcggatacttattggcgactagctttaccctccggaacaaatcgtgaccacccgtggtgcaaccctctagggaaaaatcaaaggaatttgaagggtttgaggttgatagtttgtatagcagaaaacgacatactaagagataggaatctagaattatgctccattttaggtgatgtagggaatgaagtggagcatctgacttctgaaggagtgggacatgcatttcatgttttagataggtccccacactccctaactcgaaggcaagaaatgatgtctcatattatcaactttattatgtaatagattattgaaatataaactaattggttgaaaatagattcttgcattgttgtatttatacatttcatatgaagtatggttaagtatgtaccatacatgcatataattatttaagaaattagatgataccacgccatatatatttcaattatttgaagtacccaaaaaaaaaaaaaaaaaaaaaa

SEQ ID NO: 277 - protein, 341 aa, Delosperma nubigenum
MGAMVIDEFHQIGPKPNYDNEDYLVEEIEGLIKVHKSGYVERSQVVPCVDTSLSVGLGVTAEDVFIDKVTNVWARIYVPNCDGNVFIDKFPVLIYFHGGGFCLGSAAWKCYHEFLGELSSQSRCLIMSVNYRLAPESPLPAAYEDGIKALMWLKKQALSQSSECWWTSHCDFSSILLGGDSAGANLAYNVALKLGTPQIGSLRPLKIRGIILIQPFFGGKERTHFEKLMVQSRRSALSLSISDTYWRLALPSGTNRDHPWCNPLGKNQRNLKGLRLIVCIAENDILRDRNLELCSILGDVGNEVEHLTSEGVGHAFHVLDRSPHSLTRRQEMMSHIINFIM

SEQ ID NO: 278 - DNA, 1306 bp, Delosperma nubigenum
aatattgtccaacatttaaatcatgaaataaatcatatggcatcctaaatcctacactaagcggtccaagccacccatcccaaatcacaaaatcagaaaagtcaaccaaaccaaaccgaaccttctcccatggattcaaccatgagttcaagcgaaatactccacgatctcacacctctactccgtgtctacaaagacggccgagtcgagcgactagccgagtcacccacggtcccgccatcgctcgacccggcaaccggtgtcgagtccaaagacatcaccatccgccccgaaaccggagtttcggtgaggatttttaagcccgaccaggttgaaaacccgaaagagaaacttccgatattgatgtttttccatggtggtgggttttgtattgatagcgccttttgccctctttatcataattaccataatagcctcgctgctcaagctcgagttttgatcgtctctgttgactatcggctagcccccgagcatgttctccctgttgcgtatgatgattgttgggatgctctcaattgggtctttgaacattctacaggttcttcttttggttcaagcaaccaagaaccatggctcctagagaatgcggatttttctagaatcttcctagccggggacagttcgggtgctaacatcgcacatcagatagccttacgagtgggcaaacaaggattaggcaacggttcaatccataaaatcaatggcatcattctatttcactcctacttttggggcaaagaccgcattggtactgaggctactaaattgactaccgttccatacccgaatatatccgaacaagtatgggcggttgtctgccccgggagcaccagcattgacaatccatggatcaacccggccactgacccgaccctgtcgaggttgggatgtgaaagggtgctgatattcgtggcggaaatggatagatatagagacagagggttttactacaaggaggttttggagaagagtgggtggcaggggaatgctgaggtggttgagtccctaggggaagatcatggatttcacctctacaaacctacttgtccaaatgctttggatgttatggcaaaggtggttgatttcctcaaccctgctgcttcaaacactcaaatctagtgctaattttgctgttatttttctcccttgaattttgttgttcctcatacttattgtggttggagtatatttgcaaggcctactactgtttattttgcccattttcacggaatatcatcttcctttaaaaagaaatatttatccaaaaaaaaaaaaaaaaaaaaaa

SEQ ID NO: 279 - protein, 336 aa, Delosperma nubigenum
MDSTMSSSEILHDLTPLLRVYKDGRVERLAESPTVPPSLDPATGVESKDITIRPETGVSVRIFKPDQVENPKEKLPILMFFHGGGFCIDSAFCPLYHNYHNSLAAQARVLIVSVDYRLAPEHVLPVAYDDCWDALNWVFEHSTGSSFGSSNQEPWLLENADFSRIFLAGDSSGANIAHQIALRVGKQGLGNGSIHKINGIILFHSYFWGKDRIGTEATKLTTVPYPNISEQVWAVVCPGSTSIDNPWINPATDPTLSRLGCERVLIFVAEMDRYRDRGFYYKEVLEKSGWQGNAEVVESLGEDHGFHLYKPTCPNALDVMAKVVDFLNPAASNTQI

SEQ ID NO: 280 - DNA, 1296 bp, Delosperma nubigenum
tataagggctcgatgagatactggcatgtataacctcaaagctattcacataagataattgtatgattaagagaatggctaccctctctctaaatcctagactaggcatccatgcaggcaaaaaccaccagcaacatgatgctgtggtggaggagatagaagggctcatcaaggtgtataaaaatggacatgtggaaagaccaccaatcatcccaaatgtcccttgcagtgttccatctgagctcaaggtgacagcaagggatattgtgattgacaggttcaccaacctatgggcacgtgtctacgtcccacatcttcaaagaaagcttcctttgcttgtatacttccatggaggcggcttttgggttggctcagcagcatggagctgttaccatgactttttagccaacctagcatccaaggcaggctgcgtggtcatgtcagtaaattaccgcttagcccctgaaatccgtctccctgctgcatatgaggacggtttcagtactctcatgtgggtaaaagagcaagctggaaagaggtccagtgaacattcttggtggataaactgttgcaatctcacatgtttcttcctagcaggtgacagcgcaggagccaacatagctcataacgtggctctaaggttaggggccaacagagcagcagaatcaaccaaattaaagccactgtgtcacaggggcacgatcctgatccagcctttctttggaggagaggcacgaactgtgtctgaaagaacccctcaaccacctagctcagcacttaccctatcagcatctgatacctattggcggctatcacttccagcaggctctaaccgagaccatcattggtgcaatcctctcgcaaacggttcagatagcttgagaagtattacacttccagctacattggtttgcgtgtcagaaacggatatcatgaaggataggagcgtagagttctgctcttccatggttaatgcaggtaaagcagtgcaaatggtggtctacaagggtgttggccatgcattccacatcttgcataattctccactctccaagactcgtacccaggaaatgatggctaacttaaaggctttcatcaacaaatgaccgcaaggacttcccgtaatctttatttcaacccacttgtatttgattacttagttcacagaagtgtttctatctctaatccccgcccccctagttcacagaagtacactttcataaaaggtgtgaaatgataggcttgctgtaagaaatactaatttactcggtttaaaaaaaaaaaaaaaaaaaaaaa

SEQ ID NO: 281 - protein, 347 aa, Delosperma nubigenum
MIKRMATLSLNPRLGIHAGKNHQQHDAVVEEIEGLIKVYKNGHVERPPIIPNVPCSVPSELKVTARDIVIDRFTNLWARVYVPHLQRKLPLLVYFHGGGFWVGSAAWSCYHDFLANLASKAGCVVMSVNYRLAPEIRLPAAYEDGFSTLMWVKEQAGKRSSEHSWWINCCNLTCFFLAGDSAGANIAHNVALRLGANRAAESTKLKPLCHRGTILIQPFFGGEARTVSERTPQPPSSALTLSASDTYWRLSLPAGSNRDHHWCNPLANGSDSLRSITLPATLVCVSETDIMKDRSVEFCSSMVNAGKAVQMVVYKGVGHAFHILHNSPLSKTRTQEMMANLKAFINK

SEQ ID NO: 282 - DNA, 1226 bp, Delosperma nubigenum
tacttcacaaaaaatatcattattagacaaaagataatactagtagttgatttgtgaattagggaccatacctagtggcctccatcctcattgaattacacaatttgctataacaatggcttccgataacagcgattccgatgtcctccacagcttccacttcttcaacgtcctcaaagacggccgagtcaacgtcttccaacccccggacgtacaaatccctcccgccgacgaccccatcaccggcgtcaaaatcaaggacgtcaacatctcctccgacgcctccgcccgtgtcttcctcccaccgtccgccgccgcatcaaccgccgccaaactccccgtcctcctctacttccacggcggcgctttctgcaagctatccaccttctccgccgactacactgatctcatgacccgcctcgccgccgacggaaacctcatcgccgtctccgtcgagtacggcctcttccccgcccgccccctccccgcctgctacgacgactcctgggcggcgatcaactggatcgccgcccatgccggtggcgccgggcccaacccgtggctgaaccaccacgccgaccttggccgcctctacatcggcggaaactccgctggggctaacatcagccactacctggctgcccgggtcgggtttcacgggctacccggaggtgtgaccctatcgggtatgatcctgatccacccgtatttcgcggaggatgataagatgtggatgtacatgtgcccgacaaatgaaggcccgagggaccgtcggatgtgcccgcacccggaggatttggagcgggtcgggtgcgggcgggttctggtgtttctggcggagagagattttctccgggacgccggaagacggtacacggaggagctgatgaagagcgggtggaaggggacggtggagattgtggagaacaaagagaggggacattgcttctttgtgggcaatcttgaggatgaggaaactgttgttattctgcgtaggacaatctctttcattaatcacattacaaattaatcatcaagattaatccaggaaaaaagatgccaagacaagtataatgttgtttttgttgagtatttttccctttttgtttgtagttgtgtagtgaaatttaaaggatgtgaaatttaattgtatcaaccaagctatcaaacaagtgcaaatataagcgggtgaagttttattcacaaaaaaaaaaaaaaaaaaaaaa

SEQ ID NO: 283 - protein, 304 aa, Delosperma nubigenum
MASDNSDSDVLHSFHFFNVLKDGRVNVFQPPDVQIPPADDPITGVKIKDVNISSDASARVFLPPSAAASTAAKLPVLLYFHGGAFCKLSTFSADYTDLMTRLAADGNLIAVSVEYGLFPARPLPACYDDSWAAINWIAAHAGGAGPNPWLNHHADLGRLYIGGNSAGANISHYLAARVGFHGLPGGVTLSGMILIHPYFAEDDKMWMYMCPTNEGPRDRRMCPHPEDLERVGCGRVLVFLAERDFLRDAGRRYTEELMKSGWKGTVEIVENKERGHCFFVGNLEDEETVVILRRTISFINHITN

SEQ ID NO: 284 - DNA, 1412 bp, Delosperma nubigenum
aacttttacatacatatcatatccaaaaccaagccattttctcacccacccaaaaaaaaaaaaaaaaaaaaaaaaaaaaaaaaaaaaaaaacatttatagaaagccatggattcaagcaggaatgaaagtgaaatagtccatgatgtaccacccctgcttcgagtctacaaagacggccatattgagcggttgattgaggttgattctatcccgccatcaatcgatccaacaaccagtgtcgagtccaaagacatcaccatcatccctgaaactggtgtttcggcaaggcttttcaaacccagctgcgtagaccagaacccgaaagccaaggtcccgatcttggtgtatttccatggtggtggattctgttatgaaagcacattctctcccctctatcatccttaccttaatagcctcgcctctcaggctcgaatcctcattgtctctgtcgagtatcgactaacccccgagcaccttcttcctgctgcttatgacgatggttgggccgcactcaattgggtcatctcgcactccacgggccactcctttggttcaagtaagagagaaccttggctcctagagaatgcggattttggaagagtttatctggcgggggacagtgcaggtgcgaacatctctcatcatatggccttacgaataggcaaccagggtttagctgatggctcaattcgtcgcattaatggcgtcattcttttccaccccttctcctggggctgtgaccgcattggtgatgaagctaataagttaagtagccagctgaactcggctatagtagaaaaagtatggacaattgcgtgtcccccgagcagcgggatggatcatccgtttgtcaatccagccaaagactcgaccctttcgaggctgggatgtgagagtgtgctgatatttgtggcggaaaaggatttactgagggatagaggggtttactacaaggagatcctggagaagagcgaatggcgagggaaagttgaggttgtagagacactaggagaggatcatgtcttttaccttttcaatccttcttgtgcaaatgctgctgttttgatgagtaaagtcgtggattttctcaaccctgctgcagctgcagagtcggggccctagttacttctgttataaatctaacccaattttctgtcgaaactgtcctatgttttggatctcaactattttctatgaaatcttgtaagagttttgatgaaccaaacatagaagattaaaaagtttcttaatctatgaccttcgattttcatgtttatatcatatagtttcatgtgatgtagttctgagctagatataccaattcagatttattagttttgtgctgagaaatttcgtaatctgataagagtactttggttgtttttctaaaaaaaaaaaaaaaaaaaaaaaa

SEQ ID NO: 285 - protein, 338 aa, Delosperma nubigenum
MDSSRNESEIVHDVPPLLRVYKDGHIERLIEVDSIPPSIDPTTSVESKDITIIPETGVSARLFKPSCVDQNPKAKVPILVYFHGGGFCYESTFSPLYHPYLNSLASQARILIVSVEYRLTPEHLLPAAYDDGWAALNWVISHSTGHSFGSSKREPWLLENADFGRVYLAGDSAGANISHHMALRIGNQGLADGSIRRINGVILFHPFSWGCDRIGDEANKLSSQLNSAIVEKVWTIACPPSSGMDHPFVNPAKDSTLSRLGCESVLIFVAEKDLLRDRGVYYKEILEKSEWRGKVEVVETLGEDHVFYLFNPSCANAAVLMSKVVDFLNPAAAAESGP

SEQ ID NO: 286 - DNA, 1487 bp, Delosperma nubigenum
ataaacataaaccaagtagtcattgcctcaactcttaactctcaaccactacaaagaaaaagaaaactcaagaacaacaaaaaaaatccttctttagaaaagccatggattcaagcaagaataatgaaagggaaatactccatgatgtaccacccttacctcgtgtctacaaagacggccatgttgagaggttgatagaggctgttcctatcccagcatcgctcgacccagcaaccggtgtcgaatccaaagacatcaccatcttccctgaaaccggagtttccgtaaggctttacaagcctagctggctagtggagaacccgaaagccaaggttccggtcttggtgtattttcatggaggtggtttctgtatagagagcactttctctgccctttatcatccctaccttaatagccttgcttctcaggctcgaatcctcattgtctctgtcgagtatcgactaacccccgagcaccctcttcctgccgcgtatgatgactgttggggcgctctcaattgggttgtttcgcattccacgggtgactcctttggttcaagtgacagagaaccttggctcctagagaatgcagattttgctagcgtttatgtagcgggggacagtgcaggtggtaacatcgcccatcatgtagccttgcgagttgccaaccagggtttagccgatggttccattcaccgaatcaatggggtcattcttttccacccctacttctgggggagtgaccgcattggtgatgaagctactaagttaagtagccagccgaacccggctataggagaccaagtatggactatttcctgccccacgagcagcgggatggatgatccgctgatcaaccctgtcaatgacccgaccctgtcgaggctgggatgtgagaaggtgctgatattcgtggccgagaaggatttcttgagagacagagggttttattacaaggagatccttgagaagagtgggtggaaagggaaggttgaggtggtggaatcaaaaggggaggatcatgtcttttacctcttcaatccttcttgtgcaaatgctgcagttgtgatgagcaaagtggtggatttccttaaccctgcagctgcagacactggaaattagttactgatgtcgaatatctcactcggttctctatccaaattctcctttgtacgaaaatatttgcaagagttttgatgaaacaaacatagaaggctactcaattacttgcctggaacaaacatagaagagcaatacagcggttggtcaccaaagcactcgagaaatttatacgaagtttatatgtattaaacagtttatgtgctgctaggcttgaggttcttgtaagtggtactacaagattaagtgtaactcttcttttcaaccaataagtactaaagaaaagaaccaaccactttatattatatcggtcttctaatgttatatgggtgtacctatgatttagcctaaaaaaaaaaaaaaaaaaaa

SEQ ID NO: 287 - protein, 338 aa, Delosperma nubigenum
MDSSKNNEREILHDVPPLPRVYKDGHVERLIEAVPIPASLDPATGVESKDITIFPETGVSVRLYKPSWLVENPKAKVPVLVYFHGGGFCIESTFSALYHPYLNSLASQARILIVSVEYRLTPEHPLPAAYDDCWGALNWVVSHSTGDSFGSSDREPWLLENADFASVYVAGDSAGGNIAHHVALRVANQGLADGSIHRINGVILFHPYFWGSDRIGDEATKLSSQPNPAIGDQVWTISCPTSSGMDDPLINPVNDPTLSRLGCEKVLIFVAEKDFLRDRGFYYKEILEKSGWKGKVEVVESKGEDHVFYLFNPSCANAAVVMSKVVDFLNPAAADTGN

SEQ ID NO: 288 - DNA, 1745 bp, Dennstaedtia punctilobula
ggccgtattatttgagaagggggaaattgggcgccatgggtagggtttagcaggaagaattgtcatagagctggatcgcccactctctctctctctctctctctctctttctctctcgcgtagtacacagaagaggaccccgggtattgtaagcctttctggttgggcgctacgccgtgatgatgctccagtccccgccactgcctgcaagtcacacccctgattccaagggtgctgtgcccttgagcacctgggttttgatatccaacttcaaactctcctacaatatgccgaagcggcctgatgggaccctcaatcggcacctcgcagaatttttggaccgcaaggtcactgccaacagtgtccccgtcgatggagttgccaccatggatgtgttgattgaccggacaacaggggtttgggatcgtgttttctgggaatgtgagcacgatgtatatgacagagcggcacatgtcaatcccgttcaaaatgtaatgaatgagggtccacaacaagatgcgcatgcgcctttgcaacccaagccccttgttatctatttccacggtggtagcttcgcacattcgtctgccaacagtgccatatacgatgccatgtgcaggcggcttgcaaagatgtgtggggtggttatcctgtcgatcaatttcaggcgcgcacctgagaaccgctatccgtgtgcgtatgatgatggggtgacaagcatgagatgggcgcaaggttttaatgggttggcatggttgcgatcattgggatgtgatccgcgtgaaagatgttatcttgccggcgatagttcgggaggcaacatagtgcataatgtggccgttagagccgtagaagaaggtttaccactcgcaggaacaattctgttgatgcccatgtttggcggacagtcacggacaccttccgagatggcgttggatggcaaatactttgtaaccacaaaggatagagattggtattggagagcttttttgcctgcgggggccgatagggatcaccccgcctgtaatccgttttctgcgagtgcgcctgagttgcgacatatagatcttcccccttgcctagtcgtcatgggtggttacgacattctgcaagattggcaacttaagtacgtctatggtcttcagcaagcagggaaatctgtgcaagtgatgttcttggagcaggccacaatgggctttttcttacttcccaactctgagttgttcttcttgttggtggagaggctgcgcgcttttttaaggtcgactccgtgacttacttgcagcttgcgacatactccatcaaggcaagtggtcctggatggcctgtgtgtattggtggtgcacacggtatgtttcgaagcgacaagcttttgaggatgagcttctgtgtggtttgcgacacaatacgcatttagcttttgtgatcagcggggtatgcttgcggggaccctgatcattattatggtgtgacgtgtgagtatgtgtgtgtttctcttgctttgtacttttatcacattttggggtgtgaatgggcacctgctacccactcatctggagcaagccaggtgcagccgtgtgtggggttgtaaacagacgtttgcgtctttcttgggttaatctgagggacagtctatgatgtacatcctaatagtaaaaaatgtggagggacttgtactttttacattttagtcgtattcttttatgagagcgaggtggcgcttttttaaaaaaaaaaaaaaaaaa

SEQ ID NO: 289 - protein, 364 aa, Dennstaedtia punctilobula
MMLQSPPLPASHTPDSKGAVPLSTWVLISNFKLSYNMPKRPDGTLNRHLAEFLDRKVTANSVPVDGVATMDVLIDRTTGVWDRVFWECEHDVYDRAAHVNPVQNVMNEGPQQDAHAPLQPKPLVIYFHGGSFAHSSANSAIYDAMCRRLAKMCGVVILSINFRRAPENRYPCAYDDGVTSMRWAQGFNGLAWLRSLGCDPRERCYLAGDSSGGNIVHNVAVRAVEEGLPLAGTILLMPMFGGQSRTPSEMALDGKYFVTTKDRDWYWRAFLPAGADRDHPACNPFSASAPELRHIDLPPCLVVMGGYDILQDWQLKYVYGLQQAGKSVQVMFLEQATMGFFLLPNSELFFLLVERLRAFLRSTP

SEQ ID NO: 290 - DNA, 1706 bp, Dennstaedtia punctilobula
ggcccccccctttgttgcagcttctcttccgcgcatcgccgtattatttgagaagggggaaattgggacggcgccatgggtagggtttagcaggcagaattgtcatagagctggatcgcccactctctctctctctctctctctctctctctttctctctctcgcgtagtacacagaagaggacctcgggtattgtaagcctttctggctgggcgctacgccgtgatgatgctccagtccccaccactgcctgcaagtcacacccctgattccaagggtgttgtgcccttgagcacctgggttttgatatccaacttcaaactctcctacaatatgctgaggcggcctgatgggactctcaatcggcacctcgcagaatttttggaccgcaaggtcactgccaacagtgtccccgtcgacggagttgccaccatggatgtgttgattgaccggacaacaggggtttggggtcgtgttttctgggaatgtgagcacgatgtatatgacagagcggcacatgtcaatcccgttcaaaatgtaatgaatgagggtccacaacaagatgcgcatgcgcctttgcaacccaagccccttgttatctatttccacggtggtagcttcgcacattcgtctgccaacagtgccatatacgacgccatgtgcaggcggcttgcaaagatgtgtggggtggttatcctgtcgatcaatttcaggcgcgcacctgagaaccgctatccgtgtgcgtatgatgatggggtgacaagcatgagatgggcgcaaggttttaatgggttggcatggttgcgatcattgggatgtgatccgcgtgaaagatgttatcttgccggcgatagttcgggaggcaacatagtgcataatgtggccgttagagccgtagaagaaggtttaccactcgcaggaacaattctgttgatgcccatgtttggcggacagtcacggacaccttccgagatggcgttggatggcaaatactttgtaaccacaaaggatagagattggtattggagagcttttttgcctgcgggggccgatagggatcacccggcctgtaatccgttttctgcgagtgcgcctgagttgcgacatatagatcttcccccttgcctagtcgtcatgggtggttacgacattctgcaagattggcaacttaagtacgtctatggtcttcagcaagcagggaaatctgtgcaagtgatgttcttggagcaggccacaatgggctttttcttacttcccaactctgagttgttcttcttgttggtggagaggctgcgcgcttttttaaggtcgactccgtgacttactggcagcttgcgatatactccatcaaggcaagtggtcctggatggcctgtgtgtattggtggtgcacacggtatgtttcgaagcgacaagcttttgaggatgagcttctgtgtggtttgcgacacaatacgcatttagcttttgtgatcagcggggtatgcttgcggggaccctgatcattattatggtgtgacgtgtgtgtatgtgtgtgtgtttctcttgctttgtacttttatcacattttggggtgaatgggcacctgctacccactcatctggagcaagccaggtgcagccgtgtgtggggttgtaaacagacgtttgcgtctttcttgggttaatctgagggacagtctacgaaaaaaaaaaaaaaaaaggccgc

SEQ ID NO: 291 - protein, 364 aa, Dennstaedtia punctilobula
MMLQSPPLPASHTPDSKGVVPLSTWVLISNFKLSYNMLRRPDGTLNRHLAEFLDRKVTANSVPVDGVATMDVLIDRTTGVWGRVFWECEHDVYDRAAHVNPVQNVMNEGPQQDAHAPLQPKPLVIYFHGGSFAHSSANSAIYDAMCRRLAKMCGVVILSINFRRAPENRYPCAYDDGVTSMRWAQGFNGLAWLRSLGCDPRERCYLAGDSSGGNIVHNVAVRAVEEGLPLAGTILLMPMFGGQSRTPSEMALDGKYFVTTKDRDWYWRAFLPAGADRDHPACNPFSASAPELRHIDLPPCLVVMGGYDILQDWQLKYVYGLQQAGKSVQVMFLEQATMGFFLLPNSELFFLLVERLRAFLRSTP

SEQ ID NO: 292 - DNA, 1426 bp, Dennstaedtia punctilobula
ggatggcagctatcaacacctcagaggaagttgctacccctgcagagtccaagggtgtggttcccttgacaacatgggtgcttatatccaacttcaaaattgcatacaatcttctcagaagaccagatggatctttcaacagggatctggcggaattcctcgaccgcaaagcgcccgcaaacgccgtacctacggatggcgttgctaccatggatattgtcatcgacagggccctcggtctttggggacgggtgttttgggcaacagatgcctacgcaaatgcacgtgattcgtcgaattcacggcctttgcttgtatatttccacggagggagcttcgtccattcgtcggccaacagctccatatacgacgcaatgtgtaggcggtttgcgaagatgtgcggggtcgttgtgttctccataaactttcgaagggcaccagagcacaggtatccggctgcgtacgaagatggggcaacgtgcataaggtgggcgaagagtttggtaggaaggcaatgccttgcagaagtggggtgcaatccgagccgatgttttgtcgcgggggatagttcggggggtaatatcgcgcacaatgtagcggcgatgttagcggaagaaggtacaccgttatcggggacagtgcttctgatgcctatgtttggaggccaacagaggaccgctgcagagaggctactagatggcaaatattttgttactatgaaggatagggattggtattggcgcgccttcttgccccccgggtccaatcgcgagcaccctgcgtgtaatcccttttcggctatcgcgccctcattggtcgatatcaacctcccgccttccctcgtcgtcgttggtgggttcgacatcttgcaggattggcaactgaattatgtgcattctatgcagagggcgggcaagccgttgcaattgcttttcctcgagcaagccaccatgggcttctttctgctgccgaatacggagttgttctacacgctcgtggaaaggttgaaagagtttttcaccgtgccgtagtgtcaaataacagtgtgagcgacggtgcgggtgaggaggcgtcgtcgatgacgttgacgaaggtggctgtaaggacaacagtgttgatgctggtgtagttctctctctctctctctctctctctcacacacacacacacacacgtggaggcactctctctttttctctgatggtgtagttctctctctcccataatttgcagtttctctctcttaacacagcatacactcccaaaactgtccaattctctctctctctctcacacacacacacacacacacacatggaggtactctctctctctcttccacacccccatctttctacccaaagtttgcaatgcctaccatgtgcagaacatctagccatggcttggaccttgcatagatcagctc

SEQ ID NO: 293 - protein, 342 aa, Dennstaedtia punctilobula
MAAINTSEEVATPAESKGVVPLTTWVLISNFKIAYNLLRRPDGSFNRDLAEFLDRKAPANAVPTDGVATMDIVIDRALGLWGRVFWATDAYANARDSSNSRPLLVYFHGGSFVHSSANSSIYDAMCRRFAKMCGVVVFSINFRRAPEHRYPAAYEDGATCIRWAKSLVGRQCLAEVGCNPSRCFVAGDSSGGNIAHNVAAMLAEEGTPLSGTVLLMPMFGGQQRTAAERLLDGKYFVTMKDRDWYWRAFLPPGSNREHPACNPFSAIAPSLVDINLPPSLVVVGGFDILQDWQLNYVHSMQRAGKPLQLLFLEQATMGFFLLPNTELFYTLVERLKEFFTVP

SEQ ID NO: 294 - DNA, 1260 bp, Dennstaedtia punctilobula
gggagagagagagagagagagctctgcagcctgccatgtcttctccatctgagcaaccttctgtggagtaccaatattacgagctcacggtctacagcgatggctccatccaccgtgctccctgggatccgcctcttgtgcccgcttgcccctccccttccaaccccaaccaggtggcctccaaagatattacccttaaccccacctttggcacctgggctcgcctcttcctgcctcctctcccctccaccccctcccacaagctccccatttacctctattttcatgggggtggcttcatgcacttcaccacatccgtcggtcccctccatgcctacctatgcaggctggcggcccacacgaactcgctgattgtgtctgtcgattaccgcctcgctcccgagcacccgctccccgccgcttatgaagacggcttcgaagccctccaatggctcaaccgacaggctgcgcttggggcctctggcgagccttggcttgcaaatcatggtgacttctcgcgatgcttcatgggcggcgacagcgcagggggtactatggtgcattatgtggctatgcaagctgtaggacatgggtcatggaagtcccagcataaagacaatgcactggagaatgtgtctctacagggcttgctcttcttccaccctttcttcacatgcggccacgcagaggagaatcgtccaattgacagcaggggcgccaaaatcttcaagtacctcaacgttactgtagatcacccccttgtggacccgctgagccctgccgccccgtccctcgctagtgctccgctacctcgcacgcatgtctttgttgcaggccgcgacagcctgaagaaaggcgggttggtttactatcggagcctcgtggaggcagggaagcaggccaagctttccctagccgaagaggaagaccatgtgtttcacctgctcaccccagactcccccaatgtcatccctctcttggatgaggtaagagatttcattcactctcaggctgctaatgtctaagggctgtagctgacgaatctcatatatggttatgtactcttaagctatgccctgccttggacgtcacacttttttttaaataaatgatctttgttgggcatttgattgcctttgaaaagattagccctttgtatgctcccatttgggagtcgaaccttcaatctctatggcttcttcaacatttttgaaggacttgtatattggccacacattgatggggattcattcataagag

SEQ ID NO: 295 - protein, 329 aa, Dennstaedtia punctilobula
MSSPSEQPSVEYQYYELTVYSDGSIHRAPWDPPLVPACPSPSNPNQVASKDITLNPTFGTWARLFLPPLPSTPSHKLPIYLYFHGGGFMHFTTSVGPLHAYLCRLAAHTNSLIVSVDYRLAPEHPLPAAYEDGFEALQWLNRQAALGASGEPWLANHGDFSRCFMGGDSAGGTMVHYVAMQAVGHGSWKSQHKDNALENVSLQGLLFFHPFFTCGHAEENRPIDSRGAKIFKYLNVTVDHPLVDPLSPAAPSLASAPLPRTHVFVAGRDSLKKGGLVYYRSLVEAGKQAKLSLAEEEDHVFHLLTPDSPNVIPLLDEVRDFIHSQAANV

SEQ ID NO: 296 - DNA, 1266 bp, Dennstaedtia punctilobula
gctctaatggcgaactgcgggtgctctgttctataggggcatcgatggaggtagacaagagagtggtggtgacccaaatcccgggtgcccttgtcttgtatgaagacggatttatagagcgtttcccatcgcccctgcccctcctgctgccttcatcagagttcatcaatggagtggccacaaaggatgtgaacatcaatgcgtccaagggcacttgggcgcgtatcttcttgccccatagcgtcgcacacagaaaccctatgcagggcccagcccccttggtcctccatttccatggtgggggtatgtgccttggtagccctgccgaatccatgtatcacaatttttgcagtagaatggcttcctcatcaagctccatatggatctcaattgcgtaccgccttgcccccgagcaccgccttcccacacagtaccaggactgttatgaagctgtctgttggctacgatcccagtttgcgaccaagacgcacccattagagcaggatgaggcaagtcggatttctgcttctggcagaagggaaccatgggagattgagagggatgaatccacgtcaagtgagagagagccatggctgattcagcatggtgatgcggctagagttttctgcacgggggaaagtgcgggagccacgattctgcacttcgtcgcattaaaagttgtcaagcaggaatggagccccctccatatccggggcctcatgtttgtcgattttggggtaatgacagaccctcttcctcaaatgaaaccctctactgatcctgccgttaccacacaagctctggcagcctctgttagattgtgcttgcctgagggagtcaggcttggggactcgctacttgactgcctacatatggattctaagcgcctttttgaggtgccatggccgcctattctgatgctcgttgcagaaagggatgtgttgcgggacagtggcatggactatttcaaatttctcaagctaggacacaaggttgtagagctccatgagtctcagggcaaaggacactgcttccatcttcttgaggtggactccgaggccgctcaggtgcgcgagaggagaatggtagagttcataaaaaagtttagcttgcaagaatgataaaatatcctgcatttcaatgtcccatatgctttttgtagctttgtgacgattgacattatgtatatgatcactatgcggagactatcaacttcagaatcaagtgtggatatgaacggccataattcatcaatgatttaaccca

SEQ ID NO: 297 - protein, 358 aa, Dennstaedtia punctilobula
MEVDKRVVVTQIPGALVLYEDGFIERFPSPLPLLLPSSEFINGVATKDVNINASKGTWARIFLPHSVAHRNPMQGPAPLVLHFHGGGMCLGSPAESMYHNFCSRMASSSSSIWISIAYRLAPEHRLPTQYQDCYEAVCWLRSQFATKTHPLEQDEASRISASGRREPWEIERDESTSSEREPWLIQHGDAARVFCTGESAGATILHFVALKVVKQEWSPLHIRGLMFVDFGVMTDPLPQMKPSTDPAVTTQALAASVRLCLPEGVRLGDSLLDCLHMDSKRLFEVPWPPILMLVAERDVLRDSGMDYFKFLKLGHKVVELHESQGKGHCFHLLEVDSEAAQVRERRMVEFIKKFSLQE

SEQ ID NO: 298 - DNA, 1401 bp, Dennstaedtia punctilobula
gaacgttttcagctgtggcgaactgagggtgctctgttctacaggggtcgatggaagcagacaagagagtggtggtgacccaaatcccgggtgcccttgtcttgtatgaagacggatttatagagcgtttcccatcgcccctgccccttctacctgcttcatcagagttcatcaatggagtggccacaaaggatgtgaacatcaatgcctccaagggcacttgggcgcggatcttcttgccccatagtgtcgcacacagaaaccctatgcagggcccagcccccttggtcctccatttccatggtggggctatgtgccttggtagccctgccgaatccatctatcacaatttttgcagtagaatggcatcctcatcaagctccatatggatctcaattgcttatcgccttgcccctgagcaccgccttcccacacagtaccaggactgttatgaagctgtctgttggctgcgatcccagtttgcgaccaagatgcgcccatcagagcaggatgaggcaagtcggatttccgcttctggcagaagggaaccatgggagattgagagggatgaagccacgtcaagtgagagggagccatggttgattcagcatggggatgcggctagagttttctgcactggggaaagcgcgggaaccacgattctgcactttgtcgcgttgaaagttgtcaaacaggaatggagccccctccatatccggggcctcatgtttgtcgatttaggggtaatgacagaccctcttcctcaaatgaaaccctctaccgatcctgccgttaccacacagactctggcagcctctgctagattgtgcttgcctgagggagtcaggcttggggactcgctacttgactgcctacatgtggattctaagcgcctttttgaggtgccatggccgcctattctgatgctggttgcagaaagggatgtgttccgggacagtggcatggactattacaaatttctcaagctaggacacaaggttgtagaggtccatgaatctcagggcaaaggacactgcttccatcttattgaggtcgactccgaggccgctcaggtgcgcgagaggagaatggttgagtttataaagaagtttagcttgcaagaatgataaaatatcctgcatttcaatgtcccataggctttttgtagctttgtgacgattgacattatgtatatgatcactatgtggatgtatgtgatcactatgcggagactatcaacttcataagtgtggatgccaacggccataattcatcaatgatttaactgatgagatctgcgtcgaaattgacattcacccttgatgagtgttgtagagttgtcaattcgcaggaaatatgcaaatacatcggagtagtccacctcgaaaaaaaaaaaaaaaa

SEQ ID NO: 299 - protein, 358 aa, Dennstaedtia punctilobula
MEADKRVVVTQIPGALVLYEDGFIERFPSPLPLLPASSEFINGVATKDVNINASKGTWARIFLPHSVAHRNPMQGPAPLVLHFHGGAMCLGSPAESIYHNFCSRMASSSSSIWISIAYRLAPEHRLPTQYQDCYEAVCWLRSQFATKMRPSEQDEASRISASGRREPWEIERDEATSSEREPWLIQHGDAARVFCTGESAGTTILHFVALKVVKQEWSPLHIRGLMFVDLGVMTDPLPQMKPSTDPAVTTQTLAASARLCLPEGVRLGDSLLDCLHVDSKRLFEVPWPPILMLVAERDVFRDSGMDYYKFLKLGHKVVEVHESQGKGHCFHLIEVDSEAAQVRERRMVEFIKKFSLQE

SEQ ID NO: 300 - DNA, 1228 bp, Dennstaedtia punctilobula
ggagcagatatctggtaacctgcgtgagagagagagagagagagctctgcagtccgccatgtcttctccatctgagcagccttctgtagagtaccaatattacgagctcacggtctacagcgatggctccatccaccgtgctccctgggatccgcctcttgtgcccgcttgcccctccccttccaaccccacccaggtggcctccaaagatattacccttaaccccacctttggcacctgggctcgcctcttcctgcctcctctcccctccaccccctcccacaagctccccattttcctctttttccacgggggtggattcatgcacttcaccacatccgtcggtcccctccatgcctacctctgcaggctggccgcccacacgaattcgctgattgtgtctgtcgattaccgcctcgctcccgagcacccgctccctgccgcttatgaagacggcttcgaagccctccaatggctcaaccgacaggctgcgctcgggtcctctggcgagccttggcttgcaaatcatggtgacttctcacgatgcttcatcggcggcgacagcgcagggggtactattgtgcattatgtggctatgcaagctgtaggacatgggtcttggcagtcccagcataaagacaatgcactggagaatgtgtctctacagggcttgctcctcttccaccctttcttcacatgcggccacgcagaggagaatcgtccaatcgacagcaggggcgccaaaatcttcaagtacctcaacgttactgtagatcacccctttatgaacccgcttagccctgcctccccgtcccttgcaagtgcttcgctacctcgcacgcttgtctttgttgcgggccgcgaccacatcaagcaaggcgggttggcttactatcggagccttgtggaggcagggaagcaggtcaagctttccctagcagaagaggaagaccatgtgtttcacatcctcatcccagactcccccaacgtcatccctctcttggatgaggtaagagattttattcactctcaggctgctaatgtctaagggctgtagctgattaaatgtgatgtaactctgaagctatgccctgccacttttccttcaaataaacttttccctacctattcgtgaaaagattcatctttgtattctttgtatgcgcccatttgggactcgaaccttcaatctctatggcttcttgaataaaaaaaaaaaaaaaaaaaa

SEQ ID NO: 301 - protein, 329 aa, Dennstaedtia punctilobula
MSSPSEQPSVEYQYYELTVYSDGSIHRAPWDPPLVPACPSPSNPTQVASKDITLNPTFGTWARLFLPPLPSTPSHKLPIFLFFHGGGFMHFTTSVGPLHAYLCRLAAHTNSLIVSVDYRLAPEHPLPAAYEDGFEALQWLNRQAALGSSGEPWLANHGDFSRCFIGGDSAGGTIVHYVAMQAVGHGSWQSQHKDNALENVSLQGLLLFHPFFTCGHAEENRPIDSRGAKIFKYLNVTVDHPFMNPLSPASPSLASASLPRTLVFVAGRDHIKQGGLAYYRSLVEAGKQVKLSLAEEEDHVFHILIPDSPNVIPLLDEVRDFIHSQAANV

SEQ ID NO: 302 - DNA, 1296 bp, Dennstaedtia punctilobula
gggtaacctgcgtgagagagagagagagagagagctctgcagtccgccatgtcttcttcatctgagcagccttctgtagagtaccaatattacgagctcacggtctacagcgatggctccatccaccgtgctccctgggatccgcctcttgtgcccgcttgcccctccccttccaaccccacccaggtggcctccaaagatattacccttaaccccacctttggcacctgggctcgcctcttcctgccccctctcccctccaccccctcccacaagctccccattttcctctttttccatgggggtggattcatgcacttcaccacatccgtcggtcccctccatgcctacctctgcaggctggccgcccacacgaattcgctgattgtgtctgtcgattaccgcctcgctcccgagcacccgctccctgccgcttatgaagacggcttcgaagccctccaatggctcaaccgacaggctgcgctcgggtcctctggcgagccttggcttgcaaatcatggtgacttctcacgatgcttcatcggcggcgacagcgcagggggtactattgtgcattatgtggctatgcaagctgtaggacatgggtcttggcagtcccagcataaagacaatgcactggagaatgtgtctctacagggcttgctcctcttccaccctttcttcacatgcggccacgcagaggaaaatcgtccaaccgacagcaggggcgccaaaatcttcaagtacctcaacgttactgtagatcacccctttatgaacccgcttagccctgcctccccgtccctcgcaagtgcttcgctacctcgcacgcttgtctttgttgcaggccgcgaccacatcaagcaaggcgggttggtttactatcggagccttgtggaggcagggaagcaggtcaagctttccctagcagaagaggaagaccatgtgtttcacatcctcatcccagactcccccaacgtcatccctctcttggatgaggtaagagattttattcactctcaggctgctaatgtctaagggctgtagctgattaaatgtgatgtaactctgaagctatgccctgccacttttccttcaaataaacttttccctacctattcgtgaaaagattcatctttgtattctttgtatgcgcccatttgggactcgaaccttcaatctctatggcttcttgaacattttttaaggactagtttcttgtatatgttgaccacacattgatgtggattcattcataagagtgttcttcagttgtatctaaaaaaaaaaaaaaaa

SEQ ID NO: 303 - protein, 329 aa, Dennstaedtia punctilobula
MSSSSEQPSVEYQYYELTVYSDGSIHRAPWDPPLVPACPSPSNPTQVASKDITLNPTFGTWARLFLPPLPSTPSHKLPIFLFFHGGGFMHFTTSVGPLHAYLCRLAAHTNSLIVSVDYRLAPEHPLPAAYEDGFEALQWLNRQAALGSSGEPWLANHGDFSRCFIGGDSAGGTIVHYVAMQAVGHGSWQSQHKDNALENVSLQGLLLFHPFFTCGHAEENRPTDSRGAKIFKYLNVTVDHPFMNPLSPASPSLASASLPRTLVFVAGRDHIKQGGLVYYRSLVEAGKQVKLSLAEEEDHVFHILIPDSPNVIPLLDEVRDFIHSQAANV

SEQ ID NO: 304 - DNA, 1382 bp, Eschscholzia californica
  misc_feature (3)..(3): n is a, c, g, or t
tanttcactaaaatttcaactccatcaaaatcatcatcaaactcaaatatttcttcaatctttcttctctatcaacaatggaagataaatcttcatcacttatatccaatattaatccatatgaagcactacaacttgtttacgacgcacaaaccgattctctcacatgtaatcttcctgttccaactatcgaatcgtcgggcgatccgaattgtaaggatatacctctcaacattgagaaaaagacatgggttcgaatttttagacccacaaccatcaccacccccacaaccaccagcgttaccactgcaacaaccaccacaaataagcttccaatcataatctactttcatggtggtgggttcatcctgtttagtgcagcctcaggtatgttccatgatttctgcaaatccatggctgcccaagtacaagctttagttgtctcagtagagtaccgcctagcacccgaaaaccgtcttccggcagcttatgatgatgcaacagatgccataaattgggttaggaatcaagccatggatcctgttaatggtgagccatggttgagagactatgctgatttctcaaagtgttttctaatgggttgtagtgctggtgctaatatttcatatcatgttggtttaaaagcattgggattggatttggaaccaataaagatttctggtttgatactgaaccaacccttttttggtggatcaaagaggacagaatcagagattagactgagggatgatcagattttgtctaacccagtgattgatttgatgtggaaattgagtttgccaattggggtagatcaagatcatgtatatagtaatccaatggctaataatggtgggggaaatgttaaagtgataaagaggatatttgtgaatggatgtgatggagatccattatttgatcgtcaagttgagtttgtgaagatgttggaaaagaagggtttaaaggttgaagcttccatggaagaaggtgggtttcatgggatgactttccttgatcccaaacaaactgattttttctgcaaaaagttgaaggatttcattttcctctcacaagttgtttaatggagagcggagcaagatcaaagggtatgtgttgattaatgtttttgtttgattaattgaaggaaaatgaatctgggactctataggacatactccaagtgtaatccttctcagaagataaagtcattttggttttttcaatctgacaaaaattgtgaaaagaccaaaatggcattgttattgtgagggggagtattcctgggagtatgcccagggagtctccctatcatcatacgtttgtttactttgacttttttcctctagttaaaggttattttattggcgaaaaaaaaaaaaaaa

SEQ ID NO: 305 - protein, 334 aa, Eschscholzia californica
MEDKSSSLISNINPYEALQLVYDAQTDSLTCNLPVPTIESSGDPNCKDIPLNIEKKTWVRIFRPTTITTPTTTSVTTATTTTNKLPIIIYFHGGGFILFSAASGMFHDFCKSMAAQVQALVVSVEYRLAPENRLPAAYDDATDAINWVRNQAMDPVNGEPWLRDYADFSKCFLMGCSAGANISYHVGLKALGLDLEPIKISGLILNQPFFGGSKRTESEIRLRDDQILSNPVIDLMWKLSLPIGVDQDHVYSNPMANNGGGNVKVIKRIFVNGCDGDPLFDRQVEFVKMLEKKGLKVEASMEEGGFHGMTFLDPKQTDFFCKKLKDFIFLSQVV

SEQ ID NO: 306 - DNA, 1573 bp, Eschscholzia californica
aagatttagagagagagaaaagtctgagacaaatatgagttcacctattctaccatggaaaactaaacttgcaatctcaatcatctccaatgttacaaatttctcccgtcgttctaacggcaccgtcaaccgtcgtctcttaaatttcttcgacctcacttccaaaatcccttccaaacaactccctaatctcaatatttcggatattacagctgactccactcgtaatctttggtttcgtctttacaccccaaccaccaccacctccactctacccgtcttgatcttcttccacggtggcggattcgctttattctctcctgcttcaaaaagctttgacgacctatgccgtcgtttcgctcttgaactctccgttattgtcgtctccgtcaactaccgtctctcaccggaattcaaatacccatctcaacatgaagactgttacgacgttttggattttctcaatcaaaagaaatttgaaaattttccggcaaacgccgatctgacgagatgttttattgtcggagatagtgcgggaggaaatatagctcatcacgtagcagtccgtgtgtctaaatctgatttccaagaattaaaagtaattggattggtagcgatccaaccgttttttggtggagaagagagaaccgattctgagaaccgattgaaaaatgatccattagtatcggttaaacgtacagattggatgtggaaattgtttttaccagaaggatgtgacagagatcatgaagtagttaacgtttttggtccaaaatctgccgatatatcgggattggagaaatttcggacaactttagtggtaattggtgggtttgatccgttacaagattggcaaagaagatattatgaagggttgaagagaaatgggaaagaagtttatttggttgaatatccaaatggtattcatgggttttattcatttcctgagttggctgattcttccctccttagatctgaacttaaagatttcattgagaaattatccaacaaatgatgtgtttttcagttttttgaatgtagtatgattgaagtttatttcatgaggaaatggggatcattcttctctctcgtttctctctctaaaacctccgacgaaggagtttccttctctctaatttttcttttattccggccaacgaccattcgccggagaagaaagttgaggtggataggaagtggtgtgatggaagagagataaggtgaggtggaggagaaagaaagaggtgatgtggcttttatgtctttaatctttttttgaggaataatttcatttggctcccgaagataatttcgtaaaaaatttagcctttaaggtcaaatcaaactgtcggacccttatgaagatcaaaacgatgaattggtcacaaattgggagtcataacggaattaacccattatgatataatataaaattaaatgatcccaaggaacccaatataatagttatttttcgaaaggcacctactttgtgaccgacttcccgcgaaaccccttactttatcaaaaatattcagatgattgattaaaaaaaaaaaaaaaaaaaaaaaaaaaa

SEQ ID NO: 307 - protein, 326 aa, Eschscholzia californica
MSSPILPWKTKLAISIISNVTNFSRRSNGTVNRRLLNFFDLTSKIPSKQLPNLNISDITADSTRNLWFRLYTPTTTTSTLPVLIFFHGGGFALFSPASKSFDDLCRRFALELSVIVVSVNYRLSPEFKYPSQHEDCYDVLDFLNQKKFENFPANADLTRCFIVGDSAGGNIAHHVAVRVSKSDFQELKVIGLVAIQPFFGGEERTDSENRLKNDPLVSVKRTDWMWKLFLPEGCDRDHEVVNVFGPKSADISGLEKFRTTLVVIGGFDPLQDWQRRYYEGLKRNGKEVYLVEYPNGIHGFYSFPELADSSLLRSELKDFIEKLSNK

SEQ ID NO: 308 - DNA, 1390 bp, Eschscholzia californica
aaaaaaagaagtcctcaaaaaatctatctgttcaactttcaactcaattgaaattctagagagagagagagataatgaagcaatcatcatcaacctccccagagcttccattaaagaccaaaataatgattgcttacgaatccgccgttgtcgatgcttcaactcgtcctaatggcaccattaatagacctctcttaagcatcttcaactttttcttacataatcctgctaataaaaaacctaagaaaggtgtgaaaaccctagatatcattgttgacccaactaaaaacctcttcttccgtctcttcatccctactattaagaaaacctcctcctcctcctccggcaccgctgcatctcccactctccctgtaattatctacttccacggtggtgggttctcattttggtctcctagtttcttcatttacgataagttctgtcgtcgattagctcggaaacttaacgcggttgtcgtttccgtcggttaccgtctctcaccggaaaataagtgtccggcacattatgaagacggattacaaactttactttttcttgacgggaaaaagttcgaaggttttccggtgaacgctgatatatcaaaatgttttatcgccggaaatagtgccggaggtaacctggctcattttgtggctgtcaaagccgctgaaaccgaatttcaagaattgaaggttatcggactgataccaattcaaccgttttttggtggagaaaagaggtcggattcagaaatccgactccgtaaagttcctgttgtttcaataaaacggactgattgggtatggaaagcgtttttacctgaaggggctaatcgagataattacgcggttaacgtctttggtccgaattcaaccgatatatcgggattggaaaagtttcccgctacattgattgttattggagggtttgatccgttacaagattggcaaaaacagtattatgaaggtttgaagaaatttgggaaagaagtttatttagttgaatacccaaaagctattcatttattttatgggtttcctgaattgcctgaatcttcaatgcttatagatgagatgaagaattttattgaaagacaagtgattggccattgaaggatataaatccataggaaactccaatcacatttttttttggagtcactaaattttttggaatctctagtgcaattgatgaacttcgaactctaatttagtttgttttgtacgcgtgtaatataatgtgtagaattttaattcttaatctataaaattattgttcattttaaaaaaaaaaaaaaaaaaaaaaaaaaaaaaaaaaaaaaaaaaaaaaaaaaaaaaaaaaaaaaaaaaaaaaaaaaaaaaaaaaaaaaaaaaaaaaaaaaaaaaaaaaa

SEQ ID NO: 309 - protein, 345 aa, Eschscholzia californica
MKQSSSTSPELPLKTKIMIAYESAVVDASTRPNGTINRPLLSIFNFFLHNPANKKPKKGVKTLDIIVDPTKNLFFRLFIPTIKKTSSSSSGTAASPTLPVIIYFHGGGFSFWSPSFFIYDKFCRRLARKLNAVVVSVGYRLSPENKCPAHYEDGLQTLLFLDGKKFEGFPVNADISKCFIAGNSAGGNLAHFVAVKAAETEFQELKVIGLIPIQPFFGGEKRSDSEIRLRKVPVVSIKRTDWVWKAFLPEGANRDNYAVNVFGPNSTDISGLEKFPATLIVIGGFDPLQDWQKQYYEGLKKFGKEVYLVEYPKAIHLFYGFPELPESSMLIDEMKNFIERQVIGH

SEQ ID NO: 310 - DNA, 1227 bp, Eschscholzia californica
acaaaagaaacacaaaagaaaaggctgacttttttagagagagggagaaacaaaatatgtctacctcaccaattcttccatggaagacgaagatatctctctctctagcctctactttcacagacattactcgtcgtactaacggcaccgtcaaccgccgtctcttaaacctcttccatatcaccaccaaaatcccctccgaaccaattcccggtctaaaaatcacagacatcaccatcgaccccgctcgtaacctctggtttcgtcttttcactccaactaacatcaccgccggcagttctcttcccgtctttattttcttccacggcggaggattcgcttttctctctcctgattcaaaaggttacgataatgtctgtcgccgcttcgctcttaaactttccgtcattgtcgtttctgttaattatcgtcactcaccggaatccaaatttcctgctcaatacgacgacggatttgatactctgaaattcttagacgagaaaaaatttaaagattttccggcgaatgcagatctgtcaaagtgctttctcgccggtgatagtgccggtggaaatatagctcatcatgtagcaatccgagcatcgaaatccgtttttcaagaactgaaagttatcggattgattgaaatccaaccgtttttcggtggagaagagagaaccgattcagagatccgattaaaaaacgctccgttagtatcagttgatcgaacagattggctttggaaagcgtttttaccagaaggatctgatcgagatcatgaagcagttaacgtttttggtccaaaatcgagtgatatatcgggattaacgttatttccgaatacgttactttttattgggggatttgatccgttacaaggttggcagagaaaatattatgaaggattgaagagaagtgggaaagaagttaatcttgttgagtatcccaatgcaattcatgctttttatgtttttcctgaattaccagagtctcctcttttgtttagagaagtgatggatttcattaaaaaacaatcaagtaaatgattataaagaaaaaagttaatggggataagttatttgtggttagaattatttgtggttagaaattgaaggggtctattttgttttatggttggccagtgcactagagtggtattattgatacaacattattataatatttatttatggaacaaaatttaatttaaaaaaaaaaaaaaaaaaa

SEQ ID NO: 311 - protein, 329 aa, Eschscholzia californica
MSTSPILPWKTKISLSLASTFTDITRRTNGTVNRRLLNLFHITTKIPSEPIPGLKITDITIDPARNLWFRLFTPTNITAGSSLPVFIFFHGGGFAFLSPDSKGYDNVCRRFALKLSVIVVSVNYRHSPESKFPAQYDDGFDTLKFLDEKKFKDFPANADLSKCFLAGDSAGGNIAHHVAIRASKSVFQELKVIGLIEIQPFFGGEERTDSEIRLKNAPLVSVDRTDWLWKAFLPEGSDRDHEAVNVFGPKSSDISGLTLFPNTLLFIGGFDPLQGWQRKYYEGLKRSGKEVNLVEYPNAIHAFYVFPELPESPLLFREVMDFIKKQSSK

SEQ ID NO: 312 - DNA, 1112 bp, Eschscholzia californica
acaaaagaaacacaagagaaaggcttgactttctttttagagagagaaacaaaatatgtctacctcaccaattcttccatggaagacgaagatatctctctctctagcctctactttcacagacattactcgtcgtactaacggcaccgttaaccgccgtctcttaaacctcttccatatcaccaccaaaatcccctccgaaccaattcccggtctaaaaatcacagacgtcaccgtcgaccccgctcgtaacctctggtttcgtcttttcactccaactaacatcaccgccggcagttctctccccgtctttattttcttccacggcggaggattcgcttttctctctcctgattcaaaaggttacgataatgtctgtcgccgcttcgctcttaaactttccgtcattgtcgtttctgttaattatcgtcactcaccggaatccaaatttcctgctcaatacgacgacggatttgatactctgaaattcttagacgagaaaaaatttcaagattttccggcgaatgcagatctatcaaagtgctttctcgccggtgatagtgccggtggaaatatagctcatcatgtagcaatccgagcatcgaaatccgtttttcaagaactgaaagttatcggattgattgaaatccaaccgtttttcggtggagaagaaagaaccgattcagagattcgattaaaaaacgctccattagtatcagttgatcgaacagattggctttggaaagcgtttttaccagatggatttgatcgagatcatgaagcagttaacgtttttggtccaaaatcgactgatatatcgggattaacgttatttccgaatacgttactttttattgggggatttgatccgttacaagattggcagagaaaatattatgaaggattgaagagaagtgggaaagaagttaatcttgttgagtatcccaatgcaattcatgctttttatgtttttcctgaattaccagagtcttctcttttgtttagagaagtgatggatttcattaaaaaacaatcaagtaaatgattataaagaaaaaagttaatggggataagttatttgtggttctttcaacaacaaaaaaaaaaaaaaa

SEQ ID NO: 313 - protein, 329 aa, Eschscholzia californica
MSTSPILPWKTKISLSLASTFTDITRRTNGTVNRRLLNLFHITTKIPSEPIPGLKITDVTVDPARNLWFRLFTPTNITAGSSLPVFIFFHGGGFAFLSPDSKGYDNVCRRFALKLSVIVVSVNYRHSPESKFPAQYDDGFDTLKFLDEKKFQDFPANADLSKCFLAGDSAGGNIAHHVAIRASKSVFQELKVIGLIEIQPFFGGEERTDSEIRLKNAPLVSVDRTDWLWKAFLPDGFDRDHEAVNVFGPKSTDISGLTLFPNTLLFIGGFDPLQDWQRKYYEGLKRSGKEVNLVEYPNAIHAFYVFPELPESSLLFREVMDFIKKQSSK

SEQ ID NO: 314 - DNA, 1119 bp, Eschscholzia californica
aaataacaaaggagtgagcctcctaccacttacaaaagaaacacaggagaaaggcttgacattctttttagagagagaaacaaaatatgtctacctcaccaattcttccatggaagacgaagatatctctctctctagcctctactttcacagacattactcgtcgtactaacggcaccgtcaaccgccgtctcttaaacctcttccatatcaccaccaaaatcccctccgaaccaattcccggtctaaaaatcacagacgtcaccgtcgaccccgctcgtaacctctggtttcgtcttttcactccaactaacgtcaccgccggcagttctctccccgtctttgttttcttccacggcggaggattcgcttttctctctcctgattcaaaaggttacgataatgtttgtcgccgcttcgctcttaaactttccgtcattgtcgtctctgttaattatcgtcactcaccggaatccaaatttcctgctcaatacgacgacggatttgatactctgaaattcttagacgagaaaaaatttgaagattttccggcgaatgcagatctgtcaaagtgctttctcgccggtgatagtgccggtggaaatatagctcatcatgtagcaatccgagcatcaaaatccgtttttcaagaactgaaagttatcggattgattgaaatccaaccgtttttcggtggagaagaaagaaccgattcagagattcgattaaaaaacgctccattagtatcagttgatcgaacagattggctttggaaagcgtttttaccagaaggtcaaggatttgatcgagatcatgaagcagttaacgtttttggtccaaaatcgagtgatatatcgggattaacgttatttccgaatacgttactttttattgggggatttgatccgttacaagattggcagagaaaatattatgaaggattgaagagaagtgggaaagaagttaatcttgttgagtatcccaatgcaattcatgctttttatgtttttcctgaattaccagagtcttctcttttgtttagagaagtgatggatttcattaaaaaacaatcaagtaaatgattataaagagaaaaagttttttttttttttttttttt

SEQ ID NO: 315 - protein, 331 aa, Eschscholzia californica
MSTSPILPWKTKISLSLASTFTDITRRTNGTVNRRLLNLFHITTKIPSEPIPGLKITDVTVDPARNLWFRLFTPTNVTAGSSLPVFVFFHGGGFAFLSPDSKGYDNVCRRFALKLSVIVVSVNYRHSPESKFPAQYDDGFDTLKFLDEKKFEDFPANADLSKCFLAGDSAGGNIAHHVAIRASKSVFQELKVIGLIEIQPFFGGEERTDSEIRLKNAPLVSVDRTDWLWKAFLPEGQGFDRDHEAVNVFGPKSSDISGLTLFPNTLLFIGGFDPLQDWQRKYYEGLKRSGKEVNLVEYPNAIHAFYVFPELPESSLLFREVMDFIKKQSSK

SEQ ID NO: 316 - DNA, 1318 bp, Eschscholzia californica
aaattcaacaatacccttcacagagaaggtactcattttcttcttccttcattttatctctctaatggaagcaactatcaccaaccttaacaatgaagtagtttttgagtttccaccatttttaagggtttataaagatggtagagttgagagaataactgtcactccagtaatccctccatctcttaatccaaccacaggtgtttcctccaaagatgtagtaatagatcctgaaagtggtgtgtctgcaagactttatcttccaaaaattactcacccaaatcagaaattcccacttttagtttactatcatggtggagcattttgtattcaaactccattctcacccacttaccataactatcttaactcattagtttcccaagccaatgttgttgccgtttcggtggattatagacgagtacccgaacattttctccccgtcgcatatgaagattcatgggccgctttaaaatgggtatcttctcattctaccggccaagggaccgagacatggctaaatgaccatggcgatttcgataaggtgtttttggctggtgatagtgctggtgctaatatagctcataatatggctattagggcggggaccgggcaaccattatcatttgggtttaagcttttgggcattggtttagtccatcctttcttctggggggtgaaaccaattggttcagaagaaaatgacatggaaaaaaaggaaatggaagataaaatttggccaattctttgtcctacaaccacaggaaacgacgatccgcttgttaacccggcgactgacccgagtctttcgaagttgggttgtagcaaggtgttggtatgtgttgcagagaaagacatatttagagatagaggaaggttttattgtgagacattgaggaagagtgggtggaatggagttatagagatttttgagacagaaggagaagaccatatatttcatattcgaaaccaaagtggtgaaaaggttgggggtctaatggaaaagttggtttctttcttcaatcaagataggtcttgagaaattgatgttttttgttgttcttgtttaggaattgcggaaaataaattagaggtactaggtttgtgtttcttgggtctactgtgttattgcttcactcggccgttcgaagtgaagtgattcggttaataattatgtttgttaagacattattcaggaaaataagatcatttgtcgttcaatctccacattttgtagagaaacgtatcttcaaatgtttaaataatagaatagtgatggaattttatgtgtttaaaaaaaaaaaaaaaaaaaaaaaaa

SEQ ID NO: 317 - protein, 324 aa, Eschscholzia californica
MEATITNLNNEVVFEFPPFLRVYKDGRVERITVTPVIPPSLNPTTGVSSKDVVIDPESGVSARLYLPKITHPNQKFPLLVYYHGGAFCIQTPFSPTYHNYLNSLVSQANVVAVSVDYRRVPEHFLPVAYEDSWAALKWVSSHSTGQGTETWLNDHGDFDKVFLAGDSAGANIAHNMAIRAGTGQPLSFGFKLLGIGLVHPFFWGVKPIGSEENDMEKKEMEDKIWPILCPTTTGNDDPLVNPATDPSLSKLGCSKVLVCVAEKDIFRDRGRFYCETLRKSGWNGVIEIFETEGEDHIFHIRNQSGEKVGGLMEKLVSFFNQDRS

SEQ ID NO: 318 - DNA, 1346 bp, Eschscholzia californica
aatccattcttacatatctttctctctaataccctagcttactctagacatggttcaagaaattgagaagaaggtggtagatcaagtgtctatttggctcaaggttttcgatgatggttcggttgaccgtacttggatgggtccgccccaattcaaattcttagctcaacccgtacctcctcacgaacatgaattcatcgaaggggtggctacccgtgacctaaccatagatgaaaactcagggctctcagctcgaatttacatccccgagacaacccaaaaagaagacgtgtcaaaattgcccgtactgcttcatttccatggaggtgggttttgtattagccaagccgattggtacatgtactaccaattttatacacgtcttgttcgctctgctcaagtcatttgtgtttcagtgcgccttcgtttggcacctgaacatcgactaccagctgcaattgacgacggctactcagctctcttatggcttcgatctgtagctcgaggagaatcagcggagccgtggctccaagctcatgcagattttagcaggatcttcctcataggagatagctcaggaggcaacctggtgcacgaagtttccgcacgtgcgggaagaacaaataagtgggatccaataaaattagctggtggtatactcttacaccagggtttttcccgattcgagagaagtaaatcggagatgaagaaagaaaacgagtcaccatttttaaccattgaaatggtagacaaattctttggtctagcattgcccattggcagcactaaggaccatccgatctgttgcccgatggggcccttagcaccatcgttgaaggggttaaaactgccaccataaatgatggaattagctgagctggatttgctactcgacaccgaactagagtttgttgaagcgatgaagaaagcaagtaaagatatcgaagtatattatagtaaaggagttgggcatagtttttatttgaaaaaggttcctgtagagatggaccgacaaaacgttgaacaatcagaacaattgatttcgaggattagtgatttcatcaaacgacattgaattatgctatgctatctatcattatacaatattatatattgtgtaagcagtacgatatagtggttctgggtgaaatttggtatattcaatcggataattttcttgacgattgtgtttatctcgagaattagccaatatagcggatgaacgaaatgtatggatatattttatctaatggtgtttaattgtgttttaaaagataataatttgtaatagttaagagggtatgaataagattataatggtttaagttaaaaaaaaaaaaaaaaaa

SEQ ID NO: 319 - protein, 269 aa, Eschscholzia californica
MVQEIEKKVVDQVSIWLKVFDDGSVDRTWMGPPQFKFLAQPVPPHEHEFIEGVATRDLTIDENSGLSARIYIPETTQKEDVSKLPVLLHFHGGGFCISQADWYMYYQFYTRLVRSAQVICVSVRLRLAPEHRLPAAIDDGYSALLWLRSVARGESAEPWLQAHADFSRIFLIGDSSGGNLVHEVSARAGRTNKWDPIKLAGGILLHQGFSRFERSKSEMKKENESPFLTIEMVDKFFGLALPIGSTKDHPICCPMGPLAPSLKGLKLPP

SEQ ID NO: 320 - DNA, 1309 bp, Eschscholzia californica
aaaattcaacaatacccttcacagagaaggtactcattttcttcttccttcattttatctctctaatggaaacaactatcaccaaccttaacaatgaagtagtttttgagtttccaccatttttaagggtttataaagatggtcgagttgagagaataactgtcactccagaaatccctccatctcttaatccaaccacaggtgtttcctccaaagatgtagtaatagatcctcaaagtggtgtttctgcaagactttatcttcccaaaatcactcacccaaatcagaaattcccacttttagtttactatcatggtggagcattttgtattcaaactccattctcacccacttaccataactatcttaactcattagtttcccaagccaatgttgttgccgtttcggtggattatagacgagtacccgaacattttctccccgtcccatatgaagattcatgggccgctttaaaatgggtatcttctcattctaccggccaagggaccgatacatggctaaatgaccatggcgatttcgataaggtgtttttggctggtgatagtgctggtgctaatatagctcataatatggctattagggcggggaccgggcaaccattatcatttgggtttaagcttttgggcattggtttagtccatcctttcttctggggggtgaaaccaattggttcagaagaaaatgacatggaaaaaaaggaaatggaagataaaatttggccaattctttgtcctacaaccacaggaaacgacgatccgcttgttaacccggcgactgacccgagtctttcgaagttgggttgtagcaaggtgttggtatgtgttgcagagaaagacatatttagagatagaggaaggttttattgtgagacattgaggaagagtgggtggaatggagttatagagatttttgagacagaaggagaagaccatatatttcatattcgaaaccaaagtggtgaaaaggttgggggtctaatggaaaagttggtttctttcttcaatcaagataggtcttgagaaattgatgttttttgttgttcttgtttaggaattgcagaaaataatttagaggtactaggtttgtgtttcttgggtctactgtgttattgcttcactcggccgttcgaagtgaagtgattcggttaataattatgtttgttaagacattattcaggaaaatgagatcatttgtcgttcaatctccacattttgtagagatacgtatcttcaaatctttaaaataatagaaatagtgatggaactttaaaaaaaaaaaaaaaaaaaaa

SEQ ID NO: 321 - protein, 324 aa, Eschscholzia californica
METTITNLNNEVVFEFPPFLRVYKDGRVERITVTPEIPPSLNPTTGVSSKDVVIDPQSGVSARLYLPKITHPNQKFPLLVYYHGGAFCIQTPFSPTYHNYLNSLVSQANVVAVSVDYRRVPEHFLPVPYEDSWAALKWVSSHSTGQGTDTWLNDHGDFDKVFLAGDSAGANIAHNMAIRAGTGQPLSFGFKLLGIGLVHPFFWGVKPIGSEENDMEKKEMEDKIWPILCPTTTGNDDPLVNPATDPSLSKLGCSKVLVCVAEKDIFRDRGRFYCETLRKSGWNGVIEIFETEGEDHIFHIRNQSGEKVGGLMEKLVSFFNQDRS

SEQ ID NO: 322 - DNA, 1359 bp, Eschscholzia californica
aatccattcttagatatctttttctctactaccctagcttactccagacatggttcaagaaattgagaaaaaggtggtagatcaagtgtctatttggctcaaggttttcgatgatggctcggtcgaccgtacctggatgggtccaccccaattcaaattcttagctcaacctgtacctcctcacgaacatgaattcatcgaaggggtggctacccgtgacctgaccatagatgaaaactcagggctctctgctcgaatttacatccccgagacaacccaaaaagaagacggttcaaaattgcccgtactgcttcatttccacgggggtgggttttgtattagccaagccgattggtacatgtactaccaattttatacacgtcttgttcgctctgctcaagtcatttgtgtttcagtgcgccttcgtttggcacctgaacatcgactaccagctgcaattgacgacggctactcagctctcttatggcttcgatctgtagctcgaggagaatcagcggagccgtggctccaagctcatgcagattttagcaggatcttcctcataggagatagctcaggaggcaacctggtgcacgaagtttccgcacgtgccggaagaacaaataagtgggatccattaaaattagctggtggtatactcttacacccgggtttttcccgatcggagagaagtaaatcggagatgaagaaagaaaacgagtcaccatttttaaccattgaaatggtagacaaattctttggtctagcattgccagttggcagcactaaggaccatccgatctgttgtccgatggggcccttagcaccatcgttgaaggggttaaaactgccaccatatatgatggaattagctgagctggatttgctactcgacaccgaactagagtttgttgaagcgatgaagaaagcaagtaaagatatcgaagtatattatagtaaaggagttgggcatagtttttatttgaaaaaggttcctgtagagatggaccgacaaaacgttgaacaatcagaacaattgatttcgaggattagtgatttcatcaaacgacattgaattatgctatctttcattatacaatattatatattgtgtaagcagtacgatatagtggttcggggtgatatttggtatattcaatcggataattttcttgacgattgtgtttatctcaagaattaacgaatatagcggatgaacgaaatgtatggatatattttatctaatgttgtttaattgtgttttaaaagataataatttgtaatagttaagagggtatgaataagattataatggtttaagttaaaaaaaaaaaaaaaaaaaaaaaaaaaaaaaaaaaa

SEQ ID NO: 323 - protein, 341 aa, Eschscholzia californica
MVQEIEKKVVDQVSIWLKVFDDGSVDRTWMGPPQFKFLAQPVPPHEHEFIEGVATRDLTIDENSGLSARIYIPETTQKEDGSKLPVLLHFHGGGFCISQADWYMYYQFYTRLVRSAQVICVSVRLRLAPEHRLPAAIDDGYSALLWLRSVARGESAEPWLQAHADFSRIFLIGDSSGGNLVHEVSARAGRTNKWDPLKLAGGILLHPGFSRSERSKSEMKKENESPFLTIEMVDKFFGLALPVGSTKDHPICCPMGPLAPSLKGLKLPPYMMELAELDLLLDTELEFVEAMKKASKDIEVYYSKGVGHSFYLKKVPVEMDRQNVEQSEQLISRISDFIKRH

SEQ ID NO: 324 - DNA, 1287 bp, Eschscholzia californica
atgacaaaaattcattacttgccaaattcaacaatacccttcacagagaaggtactcattttcttcttccttcattttatctctctaatggaaacaactatcaccaaccttaacaatgaagtagtttttgagtttccaccatttttaagggtttataaagatggtagagttgagagaataactgtcactccagtaatccctccatctcttaatccaaccacaggtgtttcctccaaagatgtagtaattgatcctgaaagtggtgtgtctgcaagattttatcttcccaaaatcactcacccaaatcagaaattcccacttttagtttactatcatggtggagcattttgtattcaaactccattctcacccacttaccataactatcttaactcattagtttccgaagccaatgttgttgccgtttcggtggattatagacgagtacccgaacattttctccccgtcgcgtatgaagattcatgggccgctttaaaatgggtatcttctcattctaccggccaagggaccgagacatggctaaatgaccatggcgatttcgataaggtgtttttggctggtgatagtgctggtgctaatatagctcataatatggctattagggccggaaccgggcaaccattatcatttgggtttaagcttttgggcattggtttagtccatcctttcttctggggggtgaaaccaattggttcagaagaaaatgacatggaaaaaaaggaaatggaagataaaatttggccaattctttgtcctacaaccacaggaaacgacgatccgcttgttaacccggcgaccgacccgagtctttccaagttgggttgtagcaaggtcttggtttgtgttgcagaaaaagacatatttagagatagaggaaggttttattgtgagacattgaggaagagtgggtggaatggagttatagagatttttgagacagaaggagaagaccatatatttcatattcgaaaccaaagtggtgaaaaggttgggggtctaatggaaaagttggtttctttcttcaatcaagataggtcttgagaaattgatgttttttgttgttcttgtttaggaattccggaaaataatttagaggtactaggtttgtgtttcttgggtctactgtgttattgcttcactcggccgttcgaagtgaagtgattcggttaataattatgtttgttaagacattattcaggaaaataagatcatttgtcgttcaatctccacattttgtagagatacgaaaaaaaaaaaaaaaaaaaa

SEQ ID NO: 325 - protein, 353 aa, Eschscholzia californica
MTKIHYLPNSTIPFTEKVLIFFFLHFISLMETTITNLNNEVVFEFPPFLRVYKDGRVERITVTPVIPPSLNPTTGVSSKDVVIDPESGVSARFYLPKITHPNQKFPLLVYYHGGAFCIQTPFSPTYHNYLNSLVSEANVVAVSVDYRRVPEHFLPVAYEDSWAALKWVSSHSTGQGTETWLNDHGDFDKVFLAGDSAGANIAHNMAIRAGTGQPLSFGFKLLGIGLVHPFFWGVKPIGSEENDMEKKEMEDKIWPILCPTTTGNDDPLVNPATDPSLSKLGCSKVLVCVAEKDIFRDRGRFYCETLRKSGWNGVIEIFETEGEDHIFHIRNQSGEKVGGLMEKLVSFFNQDRS

SEQ ID NO: 326 - DNA, 1146 bp, Eschscholzia californica
accctggtagtctctctctatctatctagatctctctctaacctgcaatggcatcaagcaatttagaagtagaccatgagtttcttcccttcctaagagtatacaaaggtgggaaggtagaaagattctttatgcaagatgaagttcctgcatcaattgatacccaaactggtgtctcatcaaaagatgtcataatcaacccccaaacttctctatctgcaagactttatcttccccagacaataacttcaacccaaagtgagaaaaaactacctcttctcatttacttccatggtggttgctttgttgttggatcagcattttctcccatttaccatcaattcatgaattccttagttgcagaggctaatgtcatcgctttatcggtcgaatatcgattagcccctgaacaccctcttccagctgcttatgaagattcatgggaagcaattaaatgggttgtttcacatttcaaaggagaaggaactgaatcatggttaactaactatgttgattttaacagagttttcttgtctggtgaaagtgcaggtgctaatattacccacaacttggccatgaaacttggagaggaatccaacaacttgggtaatactgattttaaggttcttggtgttgctctaattcagcctttcttttggggtaaagaaaggattggtgtggagaaacttgatccagagagaaatgcagttactgagaggacatggtcgtttgcttatccttcgtccgacctcgggaacgatgatccacggatcaatccgattgcagttggggctccaagcttatcgggattgggctgtcgtcgggtgatagtttttattgcagagaaagatttgttgaaagatagagaatacctttactgtgaagctttggagaagagtgggtgggatgggaaacttgaaattttggagacaaaagataaagatcatgtctttcatctctttgctccaaatcttgaggaatcagttgagttgctgaaacgtttagctttgttcctaaaccagtaaaagaatggtttctctcattcttgtacaagtctgtcattgtctgaactgtgatcttggaaatcgactcatcaataataagaatgacacaattacttagagttcgaaaaaaaaaaaaaaaaaa

SEQ ID NO: 327 - protein, 325 aa, Eschscholzia californica
MASSNLEVDHEFLPFLRVYKGGKVERFFMQDEVPASIDTQTGVSSKDVIINPQTSLSARLYLPQTITSTQSEKKLPLLIYFHGGCFVVGSAFSPIYHQFMNSLVAEANVIALSVEYRLAPEHPLPAAYEDSWEAIKWVVSHFKGEGTESWLTNYVDFNRVFLSGESAGANITHNLAMKLGEESNNLGNTDFKVLGVALIQPFFWGKERIGVEKLDPERNAVTERTWSFAYPSSDLGNDDPRINPIAVGAPSLSGLGCRRVIVFIAEKDLLKDREYLYCEALEKSGWDGKLEILETKDKDHVFHLFAPNLEESVELLKRLALFLNQ

SEQ ID NO: 328 - DNA, 1157 bp, Eschscholzia californica
acccttgtagtctctctttctatctctatatctctagatctctctctaacctgcaatggcatcaagcaatttagaagtagacaatgagtttcttcccttcctaagagtatacaaaggtgggaaggtagaaagattctttatgcaagatgaagttcctgcatcaattgatacccaaactggtgtctcatcaaaagatgtcataatcaacccccaaacttctctatctgcaagactttatcttccccaaacaataacttcaacccaaagtgagaaaaaactacctcttctcatttacttccatggtggttgctttgttgttggatcagcattttctcccatttaccatcaattcatgaattccttagttgcagaggctaatgttatcgctttatcggtcgaatatcgattagcccctgaatatcctcttccagctgcttatgaagattcatgggaagcaattaaatgggttgtttctcatttcaaaggagaaggaactgaatcatggttaactaactatgttgattttaacagagttttcttgtctggtgaaagtgcaggtgctaatattacccacaacttggccatgaaacttggagaagaatccaacaacttgggtaatactgattttaaggttcttggtgttgctctaattcagcctttcttttggggtaaagaaaggattggtgtggagaaacttgatccagagagaaatgcagttactgagaggacatggtcgtttgcttatccttcgtccgacctcgggaacgatgatccacggatcaatccgattgcagttggggctccaagcttatcgggtttgggctgtcgtcgggtgatagtttttattgcagagaaagatttgttgaaagacagagaatacctttactgtgaagctttggagaagagtgggtgggatggaaaacttgaaattttggagacaaaagataaagatcatgtctttcatctctttgctccaaatcttgaggaatcagttgagttgctgaaacgtttagctttgttcctaaaccagtaaaagaatgggttctttcattcttgtacaagtctgtcattgtctgaactgtgatcttggaaatctgactcatcaataataagaatgacacaattacctagagtccaaaaaaaaaaaaaaaaaaaaa

SEQ ID NO: 329 - protein, 325 aa, Eschscholzia californica
MASSNLEVDNEFLPFLRVYKGGKVERFFMQDEVPASIDTQTGVSSKDVIINPQTSLSARLYLPQTITSTQSEKKLPLLIYFHGGCFVVGSAFSPIYHQFMNSLVAEANVIALSVEYRLAPEYPLPAAYEDSWEAIKWVVSHFKGEGTESWLTNYVDFNRVFLSGESAGANITHNLAMKLGEESNNLGNTDFKVLGVALIQPFFWGKERIGVEKLDPERNAVTERTWSFAYPSSDLGNDDPRINPIAVGAPSLSGLGCRRVIVFIAEKDLLKDREYLYCEALEKSGWDGKLEILETKDKDHVFHLFAPNLEESVELLKRLALFLNQ

SEQ ID NO: 330 - DNA, 1338 bp, Eschscholzia californica
atccattcttagatatctttttctctactaccctagcttactccagacatggttcaagaaattgagaaaaaggtggtagatcaagtgtctatttggctcaaggttttcgatgatggctcggtcgaccgtacctggatgggtccaccccaattcaaattcttagctcaacctgtacctcctcacgaacatgaattcatcgaaggggtggctacccgtgacctgaccatagatgaaaactctgggctctctgctcgaatttacatccccgagacaacccaaaaagaagacggttcaaaattgcccgtactgcttcatttccacgggggtgggttttgtattagccaagccgattggtacatgtactaccaattttatacacgtcttgttcgctctgctcaagtcatttgtgtttcagtgcgccttcgtttggcacctgaacatcgactaccagctgcaattgacgacggctactcagctctcttatggcttcgatctgtagctcgaggagaatcagcggagccgtggctccaagctcatgcagattttagcaggatcttcctcataggagatagctcaggaggcaacctggtgcacgaagtttccgcacgtgcgggaagaacaaataagtgggatccaataaaattagctggtggtatactcttacacccgggtttttcccgatccgagagaagtaaatcggagatgaagaaagaaaacgagtcaccatttttaaccattgaaatggtagacaaattctttggtctagcattgcccattggcagcactaaggaccatccgatctgttgtccgatggggcccttagcaccaccgttgaaggggttaaaactgccaccatatatgatggaattagctgagttggatttgctactggacaccgaactagaatttgttgaagcgatgaagaaagcgagtaaagatatcgaagtattttatagtaaaggagttgggcatagtttttatttgaaaaaggttcctgtagagatggaccgacaaaacgttgaacaatctgaacaattgattttgaggattagtgatttcatcaaacgacattgaagatgctatgctacctttcattatacaaatatattgtctaagcagtacgatatagtggttcggggtgatatttggtatattcaatctgataattttcttgacgattgtgtttatctcgagaattagcaaatatagcggatgaacgaaatgtatggatatattttatctaatgttgtttaattgtgttttaaaagataataatttgtaatagttaagagggtatgaataatattatcttggtttaagccaaaaaaaaaaaaaaaa

SEQ ID NO: 331 - protein, 341 aa, Eschscholzia californica
MVQEIEKKVVDQVSIWLKVFDDGSVDRTWMGPPQFKFLAQPVPPHEHEFIEGVATRDLTIDENSGLSARIYIPETTQKEDGSKLPVLLHFHGGGFCISQADWYMYYQFYTRLVRSAQVICVSVRLRLAPEHRLPAAIDDGYSALLWLRSVARGESAEPWLQAHADFSRIFLIGDSSGGNLVHEVSARAGRTNKWDPIKLAGGILLHPGFSRSERSKSEMKKENESPFLTIEMVDKFFGLALPIGSTKDHPICCPMGPLAPPLKGLKLPPYMMELAELDLLLDTELEFVEAMKKASKDIEVFYSKGVGHSFYLKKVPVEMDRQNVEQSEQLILRISDFIKRH

SEQ ID NO: 332 - DNA, 1112 bp, Eschscholzia californica
attaaaagcacttgaaatcatggcattgatcaacaatgaagaaatagtatatgagtttccaccattcataagggtttataaggatggtaaagcggaaagattgttcattagtgaagtagttcctccgtctctggattcaaatgcaattgttttatcgaaagacgttctaatcttacccgagattgatgtttctgcaagactctatcttcctaaaattactcacaaaaatcagaaattacccatcttggtttactatcatggaggaggattttgcattgaaactcctttctctccattttaccacaactatcttacttcattggtttcggaggcgaacgtaattgcagtgtcagttgattacagacgagcacccgaccattatcttcctgttgcttatgatgattcctgggctgctttaaaatgggtatcttctcattgtacaggccaagggcccgagacatggttaaatgaccatggcgatttcgatcgagtttttttggctggtgatagtgctggtgccaacatatcccataatatggccattcgggctgctgaagtagctaccgagccactttctatgaacatattggggatcatgttagttcattcatacttttgggggttggacccactcgattccgaaacgagagacatgactataaaggaaaagatggacaagctctggcccattatttgtccgttgacaaccgggttagatgacccacttatgaacccattggatgatccaaatctttcgaagttgggttgcagcagggttttggtttgtgttgcagagacagatatatttagagatagaggaaggttatactatgaaacattaaggaatagtgggtggaatggggttttggagatttttgagtccgagggagaaaatcatgtgtttcatttgttcaatccaagctcggataaggcccatgtcttgaagcaacgattggtttcttttttgaattaagaaattgatttggagatggttgtttcatctcatctgattatgattcctaatatatatgcaacttaataaaatgtagtagagaaaaacgtaaaatcaactacttgtattagatagaatatcaacaaaaaaaaaaaaaaaa

SEQ ID NO: 333 - protein, 317 aa, Eschscholzia californica
MALINNEEIVYEFPPFIRVYKDGKAERLFISEVVPPSLDSNAIVLSKDVLILPEIDVSARLYLPKITHKNQKLPILVYYHGGGFCIETPFSPFYHNYLTSLVSEANVIAVSVDYRRAPDHYLPVAYDDSWAALKWVSSHCTGQGPETWLNDHGDFDRVFLAGDSAGANISHNMAIRAAEVATEPLSMNILGIMLVHSYFWGLDPLDSETRDMTIKEKMDKLWPIICPLTTGLDDPLMNPLDDPNLSKLGCSRVLVCVAETDIFRDRGRLYYETLRNSGWNGVLEIFESEGENHVFHLFNPSSDKAHVLKQRLVSFLN

SEQ ID NO: 334 - DNA, 1343 bp, Eschscholzia californica
aatccattcttagatatctttttctctactaccctagcttactccagacatggttcaagaaattgagaaaaaggtggtagatcaagtgtctatttggctcaaggttttcgatgatggctcggtcgaccgtacctggatgggtccaccccaattcaaattcttagctcaacctgtacctcctcacgaacatgaattcatcgaaggggtggctacccgtgacctgaccatagatgaaaactcagggctctctgctcgaatttacatccccgagacaacccaaaaagaagacggttcaaaattgcccgtactgcttcatttccacgggggtgggttttgtattagccaagccgattggtacatgtactaccaattttatacacgtcttgttcgctctgctcaagtcatttgtgtttcagtgcgccttcgtttggcacctgaacatcgactaccagctgcaattgacgacggctactcagctctcttatggctacgatctgtagctcgaggagaatcagcggagccgtggctccaagctcatgcagattttagcaggatcttcctcataggagatagctcaggaggcaacctggtgcacgaagtttccgcacgtgcgggaagaacaaataagtgggatacattaaaattagctggtggtatactcttacacccgggtttttcccgatcccagagaagtaaatcggagatgaagaaagaaaacgagtcaccatttttaaccattgaaatggtagacaaattcttcggtctagcattgccagttggcagcactaaggaccatccgatctgttgtccgatggggcccttagcaccatctttgaaggggttaaaactgccaccatatatgatggaattagctgagctggatttgctactcgacaccgaactagagtttgttgaagcgatgaagaaagcaagtaaagatatcgaagtatattatagtaaaggagttgggcatagtttttatttgaaaaaggttcctgtagagatggaccgacaaaacgttgaacaatcagaacaattgatttcgaggattagtgatttcatcaaacgacattgaattatgccatgctacctttcattatacaatattatatattgtgtaagcagtacgatatagtggttctgggtgaaatttggtatattcaatcggataattttcttgacgattgtgtttatctcgagaattagcgaatatagcggatgaacgaaatgtatggatatattttatctaatgttgtttaattgtgttttaaaagataataatttgtaatagttaagagggtatgaataagattataatggtttaagttaagaaaaaaaaaaaa

SEQ ID NO: 335 - protein, 341 aa, Eschscholzia californica
MVQEIEKKVVDQVSIWLKVFDDGSVDRTWMGPPQFKFLAQPVPPHEHEFIEGVATRDLTIDENSGLSARIYIPETTQKEDGSKLPVLLHFHGGGFCISQADWYMYYQFYTRLVRSAQVICVSVRLRLAPEHRLPAAIDDGYSALLWLRSVARGESAEPWLQAHADFSRIFLIGDSSGGNLVHEVSARAGRTNKWDTLKLAGGILLHPGFSRSQRSKSEMKKENESPFLTIEMVDKFFGLALPVGSTKDHPICCPMGPLAPSLKGLKLPPYMMELAELDLLLDTELEFVEAMKKASKDIEVYYSKGVGHSFYLKKVPVEMDRQNVEQSEQLISRISDFIKRH

SEQ ID NO: 336 - DNA, 1238 bp, Eschscholzia californica
attttgtttaaaacaaaatttaagacagataattataatcactgaatttgagactatattattggggatttcagttgatcatctacaaactctttctctactctctgatggagcctaacaacactgaaatagattatcaattccttcaatattttagggtttataaagacggtagagttgagaaactacaaggcacagaaatcgtccctccacctatcgatcaaatcacaggtatttcatccaaagacattataatcgaatctgaatatggaatctcagcaagactttatcttcccgaaatcaaacacccaaatcagaaatttccccttttgattcattaccatggtggtgggttttgtattggatctccttttcatccattctacacaaattttctcaaattggtagctgccgaagctaatattgttatagtttcagttgattataggttagtaccagagcactatcttcccatagcttatgaagattcatgggtagccctaaaatgggtattttctcattctaaaggtcaaggatctgagatctggttaaatgatcatgtcaatttcgattctgtttttttagctggtgaaagtgctggagctaatataactcataacatggcaattcgagctggaactgatgaagaattcttatcttctgggtttaaaattacagggattgctttaattcatccttattttacaggaattgaaccgattggatcagaaatgaattataaaaatgaaaatggaattgggaaagcaaaagcagagaagatttggttaaaagtttgtccattgacaaccgggtgtgatgatccgcttataaacccggaaaaggacccgaatttgtcgagattgggatgtattagggttttggtttttgttgcagggacagatgggttgagagatagaggatggtattattataataaggtgaaagagagtgggtggggtggggttatggagataatggaaacagagggagaaggtcatgtctttcatctattagatcaaaggtctgagaactcaatcaacttgaggaaacggttggtttcatttctgattcaagaagatgggtttccatgaatctttctttatatttaatgtttgaatctataaagtgtttcacaaataataatcatggtctgttttaccatttttctttgtcacttgtgtttttctctcttgcaaaaattcaatttgtgttttggaaaaaaaaaaaaaaaaaaaaaa

SEQ ID NO: 337 - protein, 327 aa, Eschscholzia californica
MEPNNTEIDYQFLQYFRVYKDGRVEKLQGTEIVPPPIDQITGISSKDIIIESEYGISARLYLPEIKHPNQKFPLLIHYHGGGFCIGSPFHPFYTNFLKLVAAEANIVIVSVDYRLVPEHYLPIAYEDSWVALKWVFSHSKGQGSEIWLNDHVNFDSVFLAGESAGANITHNMAIRAGTDEEFLSSGFKITGIALIHPYFTGIEPIGSEMNYKNENGIGKAKAEKIWLKVCPLTTGCDDPLINPEKDPNLSRLGCIRVLVFVAGTDGLRDRGWYYYNKVKESGWGGVMEIMETEGEGHVFHLLDQRSENSINLRKRLVSFLIQEDGFP

SEQ ID NO: 338 - DNA, 1156 bp, Eschscholzia californica
attaatggcacttgaaatcatggcattgatcaacaatgaagaaatagtatatgagtttccaccattcataagggtttataaggatggtaaagcggaaagattgttcattagcgaagtagttcctccgtctctggattcaaatgcaattgttttatcgaaagacgttctaatcttacctgagattgatgtttctgcaagactctatcttcctaaaattactcacaaaagtcagaagttacccatcttggtttactatcatggaggaggattttgcattgaaactcctttctctccattttaccacaactatcttacttcattggtttcggaggcgaacgtaattgcagtgtcagttgattacagacgagcacccgaccattatcttcctgttgcttatgatgattcctgggctgctttaaaatgggtatcttctcattgtacaggccaagggcccgagacatggttaaatgaccatggcgatttcgatcgagtttttttggctggtgatagtgctggtgccaacatatcccataatatggccattcgggctgctgaagtagctaccgagccactttctatgaacatattggggatcatgttagttcattcatacttttgggggttggacccactcgattcggaaacgagagacatgactatagaggaaaagatggacaagctctggcccattatttgtccgttgacaaccgggttagatgacccacttatgaacccattggatgatccaaatctttcgaagttgggttgcagcaaggttttggtttgtgttgcagagacagatatatttagagatagaggaaggttatactatgaaacattaaggaatagtgggtggaatggggttttggagatttttgagtccgagggagaaaatcatgtgtttcattcgttcaatccaagctcggataaggcccatgtcttgaagcaacgattggtttcttttttgaattaagaaattgatttggagatggttgtttcatctcatctgattatgattcctaatatatatgcaacttaataaaatgtagtagagaagaacgtaaaatcaactacttgtattagatagaatatcaaccataatggatattttgaacgctccgtgtttaccggtgcataacaaaaaaaaaaaaaaaaa

SEQ ID NO: 339 - protein, 322 aa, Eschscholzia californica
MALEIMALINNEEIVYEFPPFIRVYKDGKAERLFISEVVPPSLDSNAIVLSKDVLILPEIDVSARLYLPKITHKSQKLPILVYYHGGGFCIETPFSPFYHNYLTSLVSEANVIAVSVDYRRAPDHYLPVAYDDSWAALKWVSSHCTGQGPETWLNDHGDFDRVFLAGDSAGANISHNMAIRAAEVATEPLSMNILGIMLVHSYFWGLDPLDSETRDMTIEEKMDKLWPIICPLTTGLDDPLMNPLDDPNLSKLGCSKVLVCVAETDIFRDRGRLYYETLRNSGWNGVLEIFESEGENHVFHSFNPSSDKAHVLKQRLVSFLN

SEQ ID NO: 340 - DNA, 1203 bp, Eschscholzia californica
atcaaattaagttcaaatttcatccttttctaaaggcaatcatcaaaatgtcgatcgacgtagaagcacctgtgtttcttcaagtcttgtcggacggaaaagtaaaacgatttacacctcccattgttgtcgcttcaacagaattaaagaacggatacagatcaaaagatgtcattatcgatccattaaaaccgatttctgcaagaattttccttcccgaaacaaaagattccagaagtttgcttcctattttggtttatttccatggaggtgggttctgtattggctctactacttggttaggttaccatcacttcttaggtgattattctgttcaatgtcagtgtattgttgtttcgattgactatcgtctagcaccggaaaacaaactacctatagcttatgaagatcgttttagttcacttaaatggattagcagaaagggtgactctgattcttggctaaaacgagctgatatcggtcgagtttttctttcaggagatagtgcaggaggaaatattgctcatcatgtagaagttaaatcattaaaagatcaagagtttcgagttcagatcaaagggttattattgattcacccgtacttcgggagtgataagagaacagaccaagaaatgggtgatggagctgaaagagaggtagagatgaacgatatgtattggcgattgagtttgccagaaggatcaacacgagatcattatgcgtgtaattttgagatgatagagatgtcagaagacgaatggaaaaaatttccgcctgtggtagtttacgtggctggtttagatttcttgagagagcgaggagttatgtatgcagagtatttgaagaagaaaggggtggaagtgaagctggttgaagctgaaaatgaaacacatgtttatcatgtatttcatcctgactctgagtcgactcgtctgctccaaggccagatgagcgatttcatgaatcactcgtgaaaaatggtttcatcggtaagcagtatatctctatatctccgggctaagtcgatcagtgtgctcgtgttagtatctgttctgggtcctgtgttctctctctctcgctttctgtctccgtctatctctctatctctgtctttcactctctctaactaatttataagtatgtaatgaactgaacagaaatatgaatccattatattctactccaaaaaaaaaaaaaaaaaaa

SEQ ID NO: 341 - protein, 308 aa, Eschscholzia californica
MSIDVEAPVFLQVLSDGKVKRFTPPIVVASTELKNGYRSKDVIIDPLKPISARIFLPETKDSRSLLPILVYFHGGGFCIGSTTWLGYHHFLGDYSVQCQCIVVSIDYRLAPENKLPIAYEDRFSSLKWISRKGDSDSWLKRADIGRVFLSGDSAGGNIAHHVEVKSLKDQEFRVQIKGLLLIHPYFGSDKRTDQEMGDGAEREVEMNDMYWRLSLPEGSTRDHYACNFEMIEMSEDEWKKFPPVVVYVAGLDFLRERGVMYAEYLKKKGVEVKLVEAENETHVYHVFHPDSESTRLLQGQMSDFMNHS

SEQ ID NO: 342 - DNA, 1179 bp, Eschscholzia californica
atatatatatctacttctttttcttctcttcttcattaaaagcacttgaaatcatggcattgatcaacaatgaagaaatagtatatgagtttccaccattcataagggtttataaggatggtaaagcggaaagattgttcattagcgaagtagttcctccgtctctggattcaaatgcaattgttttatcgaaagacgttctaatcttacctgagattgatgtttctgcaagactctatcttcctaaaattactcacaaaaatcagaaattacccatcttggtttactatcatggaggaggattttgcattgaaactcctttctctccattttaccacaactatcttacttcattggtttcggaggcgaacgtaattgcagtgtcagttgattacagacgagcacccgaccattatcttcctgttgcttatgatgattcctgggctgctttaaaatgggtatcttctcattgtactggccaagggcccgagacatggttaaatgaccatggcgatttcgatcgagtttttttggctggtgatagtgctggtgccaacatatcccataatatggccattcgggctgctgaagtagctaccgagccactttctatgaacatattggggatcatgttagttcattcatacttttgggggttggacccactggattcggaaacgagagacatgactataaaggaaaagatggacaagctctggcccattatttgtccgttgacaaccgggttagatgacccacttataaacccattggatgatccaaatctttcgaagttgggttgcagcagggttttggtttgtgttgcagagacagatatatttagagatagaggaaggttatactatgaaacattaaggaatagtgggtggaatggggttttggagatttttgagtccgagggagaaaatcatgtgtttcatttgttcaatccaagctcggataaggcccatgtcttgaagcaacgattggtttcttttttgaattaagaaattgatttggagatggttgtttcatctcatctgattatgattcctaatatatatgcaacttaataaaatgtagtagagaaaaacgtaaaatcaactacttgtattagatagaatatcaaccataatggatattttgaacgctccgtgtttaccggtgcataaaaaaaaa

SEQ ID NO: 343 - protein, 317 aa, Eschscholzia californica
MALINNEEIVYEFPPFIRVYKDGKAERLFISEVVPPSLDSNAIVLSKDVLILPEIDVSARLYLPKITHKNQKLPILVYYHGGGFCIETPFSPFYHNYLTSLVSEANVIAVSVDYRRAPDHYLPVAYDDSWAALKWVSSHCTGQGPETWLNDHGDFDRVFLAGDSAGANISHNMAIRAAEVATEPLSMNILGIMLVHSYFWGLDPLDSETRDMTIKEKMDKLWPIICPLTTGLDDPLINPLDDPNLSKLGCSRVLVCVAETDIFRDRGRLYYETLRNSGWNGVLEIFESEGENHVFHLFNPSSDKAHVLKQRLVSFLN

SEQ ID NO: 344 - DNA, 1111 bp, Eschscholzia californica
tacttcactaagaaaactctttctctactctctaatggagcctaacaacaatgaaatagattatcaattccttcaatattttagggtttataaagacggtcgagttgagaaactacaaggcacagaaatcgtccctccacctatcgatccaaccacaggtatttcatccaaagacattataatcgaatctgaaaatgaaatctcagcaagactttatcttcccaaaatcactcacccaaatcagaaatttccccttttgattcattaccatggtggtgggttttgtattggatctccttttcatccattctacacaaattttctcaaattggtagctgcagaagctaatattgttatagtttcagttgattataggttagcaccagaatacccacttccaatagcttatgaagattcatgggtagccctaaaatgggtattttctcattctaaaggtcaaggatctgagatctggttaaatgatcatgtcaatttcgattctgtttttttagctggtgaaagtgctggagctaatataactcataacatggcaattcgagctggaactaatgaagaattcttatcttctgggtttaaaattacagggattgctttgattcatccttattttacaggaattgaaccgattggatcagaaatgaattataaaaatgaaaatggagttggaaaagcaaaagcagagaagatttggttaaaagtttgtccattgacaaccgggtgtgatgatccgcttataaacccggaaaaggatccgaatttgtcgagtttgggatgtattagggttttggtttttgttgcagggacagatgggttgagagatagaggatggtattattatgaaacattgaaggagagtgggtggggtggagttttggagataatggaaacagagggagaaggtcatgtctttcatctattagatcaaaattctgagaactcagtcaacttgaggaaacgattggtttcatttcttattcaagaagatgagtttccatgaatctttctttatatttaatgtttgaatctatgaagtgttccacaaataataatcatggtttgttttaccattttgccaaaaaaaaaaaaaaaa

SEQ ID NO: 345 - protein, 327 aa, Eschscholzia californica
MEPNNNEIDYQFLQYFRVYKDGRVEKLQGTEIVPPPIDPTTGISSKDIIIESENEISARLYLPKITHPNQKFPLLIHYHGGGFCIGSPFHPFYTNFLKLVAAEANIVIVSVDYRLAPEYPLPIAYEDSWVALKWVFSHSKGQGSEIWLNDHVNFDSVFLAGESAGANITHNMAIRAGTNEEFLSSGFKITGIALIHPYFTGIEPIGSEMNYKNENGVGKAKAEKIWLKVCPLTTGCDDPLINPEKDPNLSSLGCIRVLVFVAGTDGLRDRGWYYYETLKESGWGGVLEIMETEGEGHVFHLLDQNSENSVNLRKRLVSFLIQEDEFP

SEQ ID NO: 346 - DNA, 1153 bp, Eschscholzia californica
atacccttgtagtctctctctatctatctagatctctctctaacctgcaatggcatcaagcaatttagaagtagaccatgaatttcttcccttcctaagagtatacaaaggtgggaaggtagaaagattctttatgcaagatgaagttcctgcatcaattgatacccaaactggtgtcccatcaaaagatgtcataatcaacccccaaacttctctatctgcaagactttatcttccccaaacaataacttcaacccaaagtgagaaaaaactacctcttctcatttacttccatggtggttgctttgttgttggatcagcattttctcccatttaccatcaattcatgaattccttagttgcagaggctaatgtcatcgctttatcggtcgaatatcgattagcccctgaacaccctcttccggctgcttatgaagattcatgggaagcaattaaatgggttgtttctcatttcaaaggagaaggaactgaatcatggttaactaactatgttgattttaacagagttttcttgtctggtgaaagtgcaggtgctaatattacccacaacttggccatgaaacttggagaagaatccaacaacttgggtaatactgattttaaggttcttggtgttgctctaattcagcctttcttttggggtaaagaaaggattggtgtggagaaacttgatccagagagaaatgcagttactgagaggacatggtcgtttgcttatccttcgtccgacctcgggaacgatgatccacggatcaatccgattgcagttggggctccaagctcatcgggtttgggctgtcgtcgggtgatagtttttattgcagagaaagatttgttgaaagacagagaatacctttactgtgaagctttggagaagagtgggtgggatggaaaacttgaaattttggagacaaaagataaagatcatgtctttcatctctttgctccaaatcttgaggaatcagttgagttgctgaaacgtttagctttgttcctaaaccagtaaaagaatgggttctttcattcttgtacaagtctttcattgtctgaactgtgatcttggaaatctgactcatcaataaagaatgacacaattacttagagttcaaaaaaaaaaaaaaaaaaaaaaaaa

SEQ ID NO: 347 - protein, 325 aa, Eschscholzia californica
MASSNLEVDHEFLPFLRVYKGGKVERFFMQDEVPASIDTQTGVPSKDVIINPQTSLSARLYLPQTITSTQSEKKLPLLIYFHGGCFVVGSAFSPIYHQFMNSLVAEANVIALSVEYRLAPEHPLPAAYEDSWEAIKWVVSHFKGEGTESWLTNYVDFNRVFLSGESAGANITHNLAMKLGEESNNLGNTDFKVLGVALIQPFFWGKERIGVEKLDPERNAVTERTWSFAYPSSDLGNDDPRINPIAVGAPSSSGLGCRRVIVFIAEKDLLKDREYLYCEALEKSGWDGKLEILETKDKDHVFHLFAPNLEESVELLKRLALFLNQ

SEQ ID NO: 348 - DNA, 1167 bp, Eschscholzia californica
acccttgtagtctatctccatctctctctatctctctctatctatctagatctctctctaacctgcaatggcatcaagcaatttagaagtagacaatgagtttcttcccttcctaagagtatacaaaggtgggaaggtagaaagattctttatgcaagatgaagttcctgcatcaattgatacccaaactggtgtctcatcaaaagatgtcataatcaacccccaaacttctctatctgcaagactttatcttccccaaacaataacttcaacccaaagtgagaaaaaactacctcttctcatttacttccatggtggttgctttgttgttggatcagcattttctcccatttactatcaattcatgaattccttagttgcagaggctaatgtcatcgctttatcggtcgaatatcgattagcccctgaacaccctcttccagctgcttatgaagattcatgggaagcaattaaatgggttgtttcacatttcaaaggagaaggaactgaatcatggttaactaactatgttgattttaacagagttttcttgtctggtgaaagtgcaggtgccaatattacccacaacttggccatgaaacttggagaagaatccaacaacttgggcggtactgattttaaggttcttggtgttgctctaattcagcctttcttttggggtaaagaaaggattggtgtggagaaacttgatccagagagaaatgcagttactgagaggacatggtcgtttgcttatccttcgtccgacctcgggaacgatgatccacggatcaatccgattgcagttggggctccaagcttatcgggtttgggctgtcgtcgggtgatagtttttattgcagagaaagatttgttgaaagacagagaatacctttactgtgaagctttggagaagagtgggtgggatggaaaacttgaaattttggagacaaaagataaagatcatgtctttcatctctttgctccaaatcttgaggaatcagttgagttgctgaaacgtttagctttgttcctaaaccagtaaaagaatggtttctctcattcttgtacaagtctgtcattgtctgaactgtgatcttggaaatcgactcatcaataataagaatgacacaattacttagagttcaaaaaaaaaaaaaaaaaaaa

SEQ ID NO: 349 - protein, 325 aa, Eschscholzia californica
MASSNLEVDNEFLPFLRVYKGGKVERFFMQDEVPASIDTQTGVSSKDVIINPQTSLSARLYLPQTITSTQSEKKLPLLIYFHGGCFVVGSAFSPIYYQFMNSLVAEANVIALSVEYRLAPEHPLPAAYEDSWEAIKWVVSHFKGEGTESWLTNYVDFNRVFLSGESAGANITHNLAMKLGEESNNLGGTDFKVLGVALIQPFFWGKERIGVEKLDPERNAVTERTWSFAYPSSDLGNDDPRINPIAVGAPSLSGLGCRRVIVFIAEKDLLKDREYLYCEALEKSGWDGKLEILETKDKDHVFHLFAPNLEESVELLKRLALFLNQ

SEQ ID NO: 350 - DNA, 1359 bp, Eschscholzia californica
aacaatacccttcacagagaaggtactcattttcttcttccttcattttatcactctaatggaaacaactatcaccaaccttaacaatgaaatagtttttgagtttccaccatttttaagggtttataaagatggtagagttgagagaataactgtcactccagtaatccctccatctcttaatccaaccacaggtgtttcctccaaagatgtagtaatagatcctcaaagtggtgtttctgcaagactttatcttccaaaaatcactcacccaaatcagaaattcccacttttagtttactatcatggtggagcattttgtattcaaactccattctcacccacttaccataactatcttaactcattagtttccgaagccaatgttgttgccgtttcggtggattatagacgagtacccgaacattttctccccgtcgcatatgaagattcatgggccgctttaaaatgggtatcttctcattctaccggccaagggaccgagacatggctaaatgaccatggcgatttcgataaggtgtttttggctggtggtagtgctggtgctaatatagctcataatatggctattagggcggggaccgggcaaccattatcatttgggtttaagcttttgggcattggtttagtccatcctttcttctggggggtgaaaccaattggttcagaagaaaatgacatggaaaaaaaggaaacggaagataagatttggccaattctttgtcctacaaccacaggaaacgatgatccgcttgttaacccggcgactgacccgagtctttcgaagttgggttgtagcaaggtgttggtttgtgttgcagagaaagacatatttagagatagaggaaggttttattgtgagacattgaggaagagtgggtggaatggagttatagagatttttgagacagaaggagaagaccatatatttcatattcgaaaccaatgtagtgaaaaggttgggggtctaatggaaaagttggcttctttcttcaatcaagataggtcttgagagattgatgttttatttttgttcttgtttaggaattccggaaaataatttagaggtactaggtttgtgtttcttgggtctactgtgttattgcttcactcggccgttcgaagtgaagtgattcggttaataattatgtttgttaagacattattccggaaaataagatcatttgtcgttcaatctccacattttgtagagatacgtatcttcaaatgtttaaaataatagaaatagtgatggaattttatgtgtttatattcgcgccaacaatattggaacatgtagatagatattctaatggataaaaaaaaaaaaaaaaaaaa

SEQ ID NO: 351 - protein, 324 aa, Eschscholzia californica
METTITNLNNEIVFEFPPFLRVYKDGRVERITVTPVIPPSLNPTTGVSSKDVVIDPQSGVSARLYLPKITHPNQKFPLLVYYHGGAFCIQTPFSPTYHNYLNSLVSEANVVAVSVDYRRVPEHFLPVAYEDSWAALKWVSSHSTGQGTETWLNDHGDFDKVFLAGGSAGANIAHNMAIRAGTGQPLSFGFKLLGIGLVHPFFWGVKPIGSEENDMEKKETEDKIWPILCPTTTGNDDPLVNPATDPSLSKLGCSKVLVCVAEKDIFRDRGRFYCETLRKSGWNGVIEIFETEGEDHIFHIRNQCSEKVGGLMEKLASFFNQDRS

SEQ ID NO: 352 - DNA, 1966 bp, Eschscholzia californica
aacagaagccattgatatattcttctctttctacttttctgctaatggagtcttcaggtaatccaatttctactgaagttgcttatgaattccaagattattttagaatatacaaagatggtcgactagaaaggttaatacccacccaaaaaatacctccatctgtagatcaaaacacaggtgtttcttccaaagatatcttaatcctacctgaaattggtatttctgcaagattatttctccccaaaaccaacaacccaaatcagaaattcccacttttgattcactatcatggaggagcttttgtaattggaaccccattttctcctacttaccataactatctcacttcagtagctgctcaagccaatgttgttatcatctctgttgattacagaaaagcaccagaatacccacttccaatagcttatgaagattcatgggtagccttaaaatgggtattttctcactctaataggaaaggaattgagaaatggttgaatgatcatgtcgatttcgattcagtatttttgggtggtgaaagtgctggtgctaatatttctcacaatatggcaattcgtgctggaactgatgaagaattctcttctagtgggtttaaaatttctgggattgttttgattcatcctttcttttgggggattgaaaggattggattggaaggagatgataagattagtaatgaaaaattggagaaactttggtgtattgtttgtccattaacaactgggtgtgatgacccgcttataaacccggtaagtgacccgaatttttcgaggttgggttgtaaccgggtttttgtgtttgttgcagagaaggatgtagtgaaagaaagagggtggttttattatgaaagtttgaggaaaagtgggtgggatggagttgtggaaattatggaatcaaaaggagagggtcatgtctttcatctttataatccaaggtgtgagagagctaaagagatgatgcaacttctggtttcctttttaaatcaagataaggtcccatgaagcaagatatatatgtgtgtgttcgtgtgtgtgtgtttgtgcgggcgtgtatatttttaaaataatcgaaaattggcaatggtgtaaaaaaacaatccctcaataggaaatacaagataagcaataagttggagatctttttttcgtccttagagcatctccaatgctaaactcaaattgttctagtatgtgtatttttaaagtgtctttggtaatttattttttagtttcccactttttcccccataaatttttttagtttctcccaaatactgaccaaaataaaagagaagaaaaaagtaataaatgagggaaagaagatgatggaaaaatataatactaagatgaaagggagaattgaagaatcaagatagaaaaaagaatttgatagtagaaggtatggacggaaaacgaaccaggcgaggtgtctacaatcacttattcttgtgcgaacagcttgacaaatttgtgcggacacttgataaagtttagtggttgcccttccagacccgtctaaaatgtgaggcaatctgcatatgtggccgtaaaatcaatcaaataagaaagtttaccaattgatgtggcttttgagctaaagcatatgtgaaatcacaatgagagagataacaaaaattatgggaggaaatgacgtaagaacatacctcattgcaccccttgtgaaacaaatagtcgtgacaaattactggcatttactgacaaacaaacaacaagagggaaaccacacatttatgatttatcgtcggtgcatgtacacgatgaagatgaagctctccttttcccaaccaaggtcgtgtttgtttctatatttgccatttaaatacgactttcactcaatgtaaatcatttggtgagaagaagctcaaaattaattaaaaagaggttgcctctaacgacacttagacaaaaaaaaaaaaaaaaaa

SEQ ID NO: 353 - protein, 326 aa, Eschscholzia californica
MESSGNPISTEVAYEFQDYFRIYKDGRLERLIPTQKIPPSVDQNTGVSSKDILILPEIGISARLFLPKTNNPNQKFPLLIHYHGGAFVIGTPFSPTYHNYLTSVAAQANVVIISVDYRKAPEYPLPIAYEDSWVALKWVFSHSNRKGIEKWLNDHVDFDSVFLGGESAGANISHNMAIRAGTDEEFSSSGFKISGIVLIHPFFWGIERIGLEGDDKISNEKLEKLWCIVCPLTTGCDDPLINPVSDPNFSRLGCNRVFVFVAEKDVVKERGWFYYESLRKSGWDGVVEIMESKGEGHVFHLYNPRCERAKEMMQLLVSFLNQDKVP

SEQ ID NO: 354 - DNA, 1190 bp, Eschscholzia californica
ataaaacttggattcatacttcatggtttcatacccttgtagtctctctctatctctctctatctatctagatccctctctaacctgcaatggcatcaagcaatttagaagtagacaatgagtttcttcccttcctaagagtatacaaaggtgggaaggtagaaagattctttatgcaagatgaagttcctgcatcaattgatacccaaactggtgtctcatcaaaagatgtcataatcaacccccaaacttctctatctgcaagactttatcttccccaaacaataacttcaacccaaagtgagaaaaaactacctcttctcatttacttccatggtggttgctttgttgttggatcagcattctctcccatttaccatcaattcatgaattccttagttgcagaggctaatgtcatcgctttatcggtcgaatatcgattagcccctgaacaccctcttccagctgcttatgaagattcatgggaagcaatcaaatgggttgtttcacatttcaaaggagaaggaactgaatcatggttaactaactatgttgattttaacagagttttcttgtctggtgaaagtgcaggtgctaatattacccacaacttggccatgaaacttggagaagaatccaacaacttgggtagtactgattttaaggttcttggtgttgctctaattcagcctttcttttggggtaaagaaaggattggtgtggagaaacttgatccagagagaaatgcagttactgagaggacatggtcgtttgcttatccttcgtccgacctcgggaacgacgatgcacggatcaatccgattgcagttggggctccaagcttatcgggattgggctgtcgtcgggtgatagtttttattgcagagaaagatttgttgaaagatagagaatatctttactgtgaagctttggagaagagtgggtgggatgggaaacttgaaattttggagacaaaagataaagatcatgtctttcatctctttgctccaaatcttgaggaatcagttgagttgctgaaacgtttagctttgttcctaaaccagtaaaagaatggtttctctcattcttgtacaagtctgtcattgtctgaactgtgatcttggaaatcgactcatcaataataagaatgacacaattacttagagttcaaaaaaaaaaaaaaaaaaaaa

SEQ ID NO: 355 - protein, 325 aa, Eschscholzia californica
MASSNLEVDNEFLPFLRVYKGGKVERFFMQDEVPASIDTQTGVSSKDVIINPQTSLSARLYLPQTITSTQSEKKLPLLIYFHGGCFVVGSAFSPIYHQFMNSLVAEANVIALSVEYRLAPEHPLPAAYEDSWEAIKWVVSHFKGEGTESWLTNYVDFNRVFLSGESAGANITHNLAMKLGEESNNLGSTDFKVLGVALIQPFFWGKERIGVEKLDPERNAVTERTWSFAYPSSDLGNDDARINPIAVGAPSLSGLGCRRVIVFIAEKDLLKDREYLYCEALEKSGWDGKLEILETKDKDHVFHLFAPNLEESVELLKRLALFLNQ

SEQ ID NO: 356 - DNA, 1279 bp, Lamium amplexicaule
acactacactagctatagctagaatgattgtgcacatggcaaaatctactcgcactcacgtcctattcttcttccttcttctccactcatgccagctaatctcatcctcccctcagcaacacacgtggcaggaagccttccaggccctgggcattaaatggaaccgcgacggaaccctaaaccgaaccatccaaatccccatggtggaccccaccccataccccgacgactccgcttccccggcccagatcgccctctcccaggacatctacctgggcccatatacaaaagcctacctccgcctctacatccccgtaaaccctcccaagaaaactaagctcccactcatcatctacatccacggcggcgacttcgtcctcttcagcgcctccaccgtcatcttccacaacttctgcaacgacatcgcctcccagctccccgccgtcgtcgtctccgtcgagtaccgcctcgccccggaaaaccgcctccccgccgccttcgacgacgccctcaacgccatcttctgggtcagaaaccagtccctcggaatcggcggccgcgacccttggctagaatacgccgacttctcccgcgtcttcctcctcgggagcagcgccggcgccaacatagcctaccacaccgccctccgcgccctcgacttcgacctccgcccactcaagatcaacggcctcctactcaaccaggcctacttcggcgggttgagaaggacgcagtcggagctccggctaatcgacgacccgtacgtggcgctgtacgtgaacgacgtgctgtggaccctggcgttgccgcggcacctgaacagggaccacgagttctgcaacccgatatccggtgggacttatttgggtcgggtgtaccgtttaccgaaggtgtacatcaagggcgattatggagatccgttagtggatagatccgtccagctgcacagtacttgcagtcttgcagagtggcggtgtcttatcggttcaacccgggaggcttccatggaattgagatgcaaaacaagacggcagctcagcaaccgtacgacgatatcaagtattttgttaatgttttgtgcatgagtccaaactctgaagatctatctcagtctcaccatcatgcttcctactgagtgagtgtgtcattttaggtgccttgcttaaagaacctggtcggtcttggttatttcctttctcattctcacttcttcttacagttactgggtttgtatgaataacaataaaatggcaccttaccaaaaaaaaaaaaaaaaaaa

SEQ ID NO: 357 - protein, 353 aa, Lamium amplexicaule
MIVHMAKSTRTHVLFFFLLLHSCQLISSSPQQHTWQEAFQALGIKWNRDGTLNRTIQIPMVDPTPYPDDSASPAQIALSQDIYLGPYTKAYLRLYIPVNPPKKTKLPLIIYIHGGDFVLFSASTVIFHNFCNDIASQLPAVVVSVEYRLAPENRLPAAFDDALNAIFWVRNQSLGIGGRDPWLEYADFSRVFLLGSSAGANIAYHTALRALDFDLRPLKINGLLLNQAYFGGLRRTQSELRLIDDPYVALYVNDVLWTLALPRHLNRDHEFCNPISGGTYLGRVYRLPKVYIKGDYGDPLVDRSVQLHSTCSLAEWRCLIGSTREASMELRCKTRRQLSNRTTISSILLMFCA

SEQ ID NO: 358 - DNA, 1426 bp, Lamium amplexicaule
gtgtgatcgaaaatgccgagcattaaagtgaaggtatatagcgtgctgttgaaattctggcttaaacgcaagctacagagcttgattgaatcctcccctggcggtaacacgtacggcgtcgtttcacgacctgatgagaccatcgctgcagcaaatcctagcttttcaattgacggcgtcgccaccaaggaccttcacatcgacccgttgacttccctctccgttcggattttcctccccgattccgccattattcgccctaaatcggttccggatctcagggttaggactccgtcgagtaggggtttgaagaaggcggtttatggcgggtattcgccggagaaaaacgggcggaattgccggaaacttccgattatcttgcagttccacggcgggggatgggtaagtggcggaagtgatacggtggcgaatgatgtgttttgcaggagactagcgaaattgtgtgacgctgtggtggtggcggtagggtataggctggcgccggaaagtaggtatccggcggcgttcgaggatggggttaaagtggtgaattggttggcgaagcagccaaatttggcggaggtggtgaacagaagaggtgtagagagtcagaagaggatgcagattgtagatggctttggggaatccatggctgaaccatggttagctgctcatggagattcatctaggtgtgttgttctcggagtaagctgcgatgcaaatattgccaactacgtcgcacaatactgcgtgaaaagagaaacaattttgaagcctgtagctcaagtcctgatgtaccctttcttcatcggaagcagttcagacacaaaggcatgtaattcctacgtctacgacaaacccatctctttgctttcatggaaactcttcttaccagaacaagagttcaagctagaccacccggcaaccaaacctggaagtgaagtggcactcaagtacatgcctccaacactcactgttgttgctgaacacgactggatgcgggacccagctatttcatactcagaggagctgcgcaaggtcaacgtagatgccccacttcttgattacaaggacgcaattcacgaatttgccacccttgatgcactcttaaacacccctcaagctcaggcctgctctgaagacattgctatttgggtcaacaagtatatatctctacgaggcaacgagctatcttactgatcaaataagatccaacgactttggattcttcacttttgtacaatttatttcactctttcatgtagactagtaagtaagccagtgtatattgttatttgtgtagtagtaaagagtaattcatttttgtcattgcactctccgttcgtgtataaatctgcttatattgcccacacttcttaataaaaattactccctccgtcccaaaaaaaaaaaaaaaaaaaaaaaa

SEQ ID NO: 359 - protein, 395 aa, Lamium amplexicaule
MPSIKVKVYSVLLKFWLKRKLQSLIESSPGGNTYGVVSRPDETIAAANPSFSIDGVATKDLHIDPLTSLSVRIFLPDSAIIRPKSVPDLRVRTPSSRGLKKAVYGGYSPEKNGRNCRKLPIILQFHGGGWVSGGSDTVANDVFCRRLAKLCDAVVVAVGYRLAPESRYPAAFEDGVKVVNWLAKQPNLAEVVNRRGVESQKRMQIVDGFGESMAEPWLAAHGDSSRCVVLGVSCDANIANYVAQYCVKRETILKPVAQVLMYPFFIGSSSDTKACNSYVYDKPISLLSWKLFLPEQEFKLDHPATKPGSEVALKYMPPTLTVVAEHDWMRDPAISYSEELRKVNVDAPLLDYKDAIHEFATLDALLNTPQAQACSEDIAIWVNKYISLRGNELSY

SEQ ID NO: 360 - DNA, 1190 bp, Lamium amplexicaule
atagtgtgcaaatcacaaaaagaaaaaatggcagataacttgctacttttgagagaaagattcaaactcaatgacccagatttgaaaacctcggcccccgccaccaaagtcataaacaacgtcactgtctccatttccgacgtccaaattgacccctcccgtactctttggttccgccttttcaccccaagcaccacgaaagccaattcagacacgttgttgcctttaattgtgtactttcacggtggaggattccaccgtttcagaccggacaacaaggtctatgaccaactttgtagccatctagccgcaaaagtacatgcagttgtagcatcggtcaactttcgtcccacacctgagcacaagtacccgagccagtacgaggatggcttagaagccataaaattcatcgatgcacaaaatattaccgttttaccaccatatactgactttagtaaatgtttcatcggaggagatagttctggagccaacatagcccatcatgtaatagtaagagcagtcaagaacggcgaacagttcaacaaagtaaggatcgttggacatctgtcgattcagccgttttttggaggagaagagccaacagaatcggagttgagattgccagtaacacctatgattgatctgaagaagggggacgaaacgtggaaggaacttctaccggagggtgcagataaaaatcacccggcagttaatgtgtatggtggtggaccgaactctgaggctagtaaagaacttaagagtctcgattttccacctactttcgtaaatgtgggagggattgatccgttgcaagatcgggggaaattttacgctaaatggttgaaggattgtggtaaggaagtggagctaagcatgtatccagatgcattccatgcgttctatttttttccggaagtagcagagtttgatatgttatttcagacgctgagaacgtttatccagaaacatgtgcatcccaaatgaattttcttctagcaagcggatagtttgggttgcaccaatataggtaggcaatagcataagtggaactttattttcccagccttgttggcactaattagtgtatgacatatatatgacttgtgtaataaatatatgaataattcattccttccatgaaattaaacatgtattatctttaaaaaaaaaaaaaaaaaaaaaaaaaaaaa

SEQ ID NO: 361 - protein, 318 aa, Lamium amplexicaule
MADNLLLLRERFKLNDPDLKTSAPATKVINNVTVSISDVQIDPSRTLWFRLFTPSTTKANSDTLLPLIVYFHGGGFHRFRPDNKVYDQLCSHLAAKVHAVVASVNFRPTPEHKYPSQYEDGLEAIKFIDAQNITVLPPYTDFSKCFIGGDSSGANIAHHVIVRAVKNGEQFNKVRIVGHLSIQPFFGGEEPTESELRLPVTPMIDLKKGDETWKELLPEGADKNHPAVNVYGGGPNSEASKELKSLDFPPTFVNVGGIDPLQDRGKFYAKWLKDCGKEVELSMYPDAFHAFYFFPEVAEFDMLFQTLRTFIQKHVHPK

SEQ ID NO: 362 - DNA, 1141 bp, Lamium amplexicaule
acacaaccactctgcataaaaattacagataaaagaaatggcagacaaggagctttcaatggagacaagaatcttcagccttcaagacatcaaaacctcggcccccgccaccaaagtcataaacaacgtctctgtctccacttccgatatccaaatcgacccctcccacactctctggttccgccttttcgccccaaccatcacagaaaccaattcagacacgaagttgcctttaattttatactttcacggcggtggattcaggcgtttcgggccagacaccaagatcttcgacgatctctgtagccacatagctgcaagagtacccgcagttgtagcctccatcaactaccgtttaacacccgagcacaagtgcccgagtcaatatgatgacgcctacaacgccttaaaattcatcgattcacaaaacactgacgttttacctgcatttactgacatcagtaactgtttcatcggaggagatagcgctggaggcaacatagcccatcatgtgacagtaagagctctccagaacggcaaccacttcaacagaataaaaatcgctggagttctgtctctgcagccggcttttggaggagaagagcgaacagagtcggagttgagactgggttacatggaacgaacggatcaactgtggagggattttctacctgagggcgcggacagaaatcactctgcaatccatgtgtttggtgatgcattgtctactgaagaagtgaagaatcttgaattcccgccgactttggtgattgtgggagggaatgatccgttgcaagattgggataaaagatatgccgaatggttgaagaattgtggcaaggaagcggagataaccgtgtatccagatgcaggacatgcgttttatgcatttacggatgtgccagagtttgatatgttattacagaggatgaaagattttgtccagaagtatgtgcatcccatttccaagtgaatttcatgtcggaatatttcataagtggagccttattctaccaccctttcatataattgaagctgaataataaaaattagtcactagctctgcaaatatgtgtctatgtttgtgcaagagatattattacattatataaaaatcttaaaaaaaaaaaaaaaaaaaaaa

SEQ ID NO: 363 - protein, 311 aa, Lamium amplexicaule
MADKELSMETRIFSLQDIKTSAPATKVINNVSVSTSDIQIDPSHTLWFRLFAPTITETNSDTKLPLILYFHGGGFRRFGPDTKIFDDLCSHIAARVPAVVASINYRLTPEHKCPSQYDDAYNALKFIDSQNTDVLPAFTDISNCFIGGDSAGGNIAHHVTVRALQNGNHFNRIKIAGVLSLQPAFGGEERTESELRLGYMERTDQLWRDFLPEGADRNHSAIHVFGDALSTEEVKNLEFPPTLVIVGGNDPLQDWDKRYAEWLKNCGKEAEITVYPDAGHAFYAFTDVPEFDMLLQRMKDFVQKYVHPISK

SEQ ID NO: 364 - DNA, 1096 bp, Lamium amplexicaule
gataaaaaaaaaagaatgggagataagcagacaatgttcctgagcgttgaggacatcaaagtctcggccccagccattaaagtcataaacaacgtctttgtctcaacttctgacgtccaaatcgacccctcccgttttctctggttccgccttttcaccccgactaccaattcaaacaagtcgttgcctttaattatatactttcacggtggtggattcaggcgtctgggccccgacaccaaggccttcgaccatctctgtagccatttttcagcaaaagtacccgcagttgtagcctccatcaactaccgctacgtgccccagcacaagtacccgactcagtacgaggacagctatgatgccttgaaattcatggataatgcacaaaacaccgctatttttcctgcatacaccgacttcaacaattgtttcatcggaggagatagctctggaggaaacatagcccatcatgtgacggtaagagctctcaagaacaacttcaacagaataagaatcgccggacttgtggctctgcagccggcttttggaggagaagagcgaacagaatcggagctgagatgccacaatattgcacgggtggacggaatttggagggactttctaccggagggtgcagacaaaaaccaccctgcggtcaatgtgtctggtggtgggcccaactctgaggctgctaaagagttgaagaaacttcttgagttcccaccaactttggtgattatgggagggaattgtccggtgcaagattgggataaaagatatgttgagtggttgaagaattgtggtaaggaagtggagccaacattgtatccggatgtagcccatgctttttatgcatatccggaagcgcccgagttcgagttgctagtgcagaggctcaaaaaatttattcataaacgatgcaatattaaatttgcatcggccaataactacaagaaaattgtgttttcgccacatttataagtgtccgtacacgtgtcttattaatgcatttaagttatcttgacattttcacaaaatgtcgtctaagttaatgtaacaataagttgattgaaaaaaaaaaaaaaaaaaaaaaaaa

SEQ ID NO: 365 - protein, 321 aa, Lamium amplexicaule
MGDKQTMFLSVEDIKVSAPAIKVINNVFVSTSDVQIDPSRFLWFRLFTPTTNSNKSLPLIIYFHGGGFRRLGPDTKAFDHLCSHFSAKVPAVVASINYRYVPQHKYPTQYEDSYDALKFMDNAQNTAIFPAYTDFNNCFIGGDSSGGNIAHHVTVRALKNNFNRIRIAGLVALQPAFGGEERTESELRCHNIARVDGIWRDFLPEGADKNHPAVNVSGGGPNSEAAKELKKLLEFPPTLVIMGGNCPVQDWDKRYVEWLKNCGKEVEPTLYPDVAHAFYAYPEAPEFELLVQRLKKFIHKRCNIKFASANNYKKIVFSPHL

SEQ ID NO: 366 - DNA, 1162 bp, Lamium amplexicaule
attcaaagtgtgcacatcacaaaaagaaaatggcagataacttgctacttttgagggaaagattcaaactcaatgacccagatttgaaaacctcggcccccgccaccaaagtcataaacaacgtctctgtctcaatttccgacgtccagatcgacccctcccgcactctgtggttccgccttttcgccccaagcatcacgaaacccaattcagacacgttgttgcctttaattgtgtactttcacggtggaggattccaccgtttcagaccggacaacaaggtctatgatcaactttgtagccatctagccgcaaaagtacatgcagttgtagcatcggtcaactttcgtcccgcaccggagcacaagtacccgagccagtacgaggatggcttagaagccataaaattcattgatgcacaaaatattaccgttttaccagcatatactgactttagtaaatgtttcatcgtaggagatagttctggagccaacatagcccatcatgtgacagtaagagcagtcaagaacggcgaacagttcaagaaagtaaggatcgttggacatctgtcgattcagccgttttttggaggagaagagccaacagaatcggagttgaggttaccagtaacacctatgattgatctaaagaaaggggacgaaacgtggaaggaacttctaccggagggtgcagataaaaatcacccggcagttaatgtgtatggtggtggaccgaactctgaggctagtaaagaattgaagagtctcgatttcccacctactttggtcaatatcggagggattgatccgttgcaagatcgggggaaattttacgctaaatggttgaaggattgtggtaaggaagcggagctaatcatgtatccggatgcattccatgcattctatttttttccggaagtggcagagtttgatatgttatttcagacgctgagaacttttatccagaaacatgtgcatcccaaatgaatttcattctagcaagaatggatagtttgggttgcaccaatatacgtagggaatagcataagtggaactttattttcccagccttgttggcactaatttgtgtatgatatatgacttgtgtaatgaatatatgaataattcattccttccttgaaaaaaaaaaaaaaaaaaaaaaa

SEQ ID NO: 367 - protein, 318 aa, Lamium amplexicaule
MADNLLLLRERFKLNDPDLKTSAPATKVINNVSVSISDVQIDPSRTLWFRLFAPSITKPNSDTLLPLIVYFHGGGFHRFRPDNKVYDQLCSHLAAKVHAVVASVNFRPAPEHKYPSQYEDGLEAIKFIDAQNITVLPAYTDFSKCFIVGDSSGANIAHHVTVRAVKNGEQFKKVRIVGHLSIQPFFGGEEPTESELRLPVTPMIDLKKGDETWKELLPEGADKNHPAVNVYGGGPNSEASKELKSLDFPPTLVNIGGIDPLQDRGKFYAKWLKDCGKEAELIMYPDAFHAFYFFPEVAEFDMLFQTLRTFIQKHVHPK

SEQ ID NO: 368 - DNA, 1459 bp, Lamium amplexicaule
agaaaatctcaaaaaaaaaaataaaaaaaaaattaatatggatacgaaaaagccccaatcccaacagcaattggcactcccatggcggacccgcatcactctcttccttctcaattccctcaccgactcctcccgccgccacgacggcaccgtcaaccgccgcctcttcaacattatggactctttcagcactatgaaggtgcctccaaaccctaacccccgtaacggcgtcaaaaccgccgacgtcaccgtcgatccctctcgaaatctctggttccgcattttcgtccccacgaataccaccgatccgaaactccccgtcgttgtcttcttccacggcggcggattcgtctacctggcgcccgatttcaaatcgtacgacgacgtttgccgcaagttcgcgcggaagatccccgccgtggttgtctccgtcaattaccggctggcgccggagcaccggtaccctgctcctttcgaagacggcttcgatgttctgaaattcctcgacgagaatagtaatgtcctgccggaaaatgctgacgtgtcgcggtgttttctggctggggatagtgccggagggaatttggcacatcacgtgactaagcgtgcctccgagtccaaatttgcaaacctcaaggtaattggagtggtggcgatacaaccgtttttcggaggcgcggaacggacaaaatcggaaattgaattagagggggtggacgtgatcgtttcgatgacgaaaactgattttatgtgggaagcattgatgccaggggtggaccgcgaccaccctgtcatcaacgttagcggccctaatgccgctgacatatccgccctagattttccggccacaatggtggtggtcgccggcttcgactccctcaaagaccggcaaatcaggtattacgagtggcttaagaagtccggaaaagaagcctatctggtggagtacccgaacatgattcacgccttttatgtcttcccggaactccctgaatctgctcagctcgtttccgacaccaagcaattcatccataaacagtgctccaagctgcaggaacaagaagaagattaatacaatactattcatttgtatttactggccaaaccttcctcccgtccatttttagtaggtccaaaacttttaaaagaataaaataaaagtgaagaagataataaatttgtatccttaatattgtgtatttttaaagagaggcctattaatattgagatattggatggatggaaaaaaaagatgcataataaaaatggatggagagtatattctttaagcgcttaattggaggatcatcaatatatctactacctttcttgtttgtttgggtaggtgggctaagtttcattttgaatatgataccagcttgaacttccccactcttttcaagttttttgtatttttaataagacaaatatttcacgtcgaaaaaaaaaaaaaaaaaaa

SEQ ID NO: 369 - protein, 344 aa, Lamium amplexicaule
MDTKKPQSQQQLALPWRTRITLFLLNSLTDSSRRHDGTVNRRLFNIMDSFSTMKVPPNPNPRNGVKTADVTVDPSRNLWFRIFVPTNTTDPKLPVVVFFHGGGFVYLAPDFKSYDDVCRKFARKIPAVVVSVNYRLAPEHRYPAPFEDGFDVLKFLDENSNVLPENADVSRCFLAGDSAGGNLAHHVTKRASESKFANLKVIGVVAIQPFFGGAERTKSEIELEGVDVIVSMTKTDFMWEALMPGVDRDHPVINVSGPNAADISALDFPATMVVVAGFDSLKDRQIRYYEWLKKSGKEAYLVEYPNMIHAFYVFPELPESAQLVSDTKQFIHKQCSKLQEQEED

SEQ ID NO: 370 - DNA, 1163 bp, Lamium amplexicaule
cccacattaataaaaatccaaattaccaaatcacacaaaatggccaatatgattcaaaaattccaggtcctagacatcaaaaccccggcacctgccaccaaagtcataaacaacatctctgtctccacttccgatgtccaaatcgacccctcccgctctctctggttccgccttttcaccccaaatatcaatttagacatgaagttgcctttaattatatactttcacggtggaggattttccaattttgggccggacaccaaggcctttgatgatctttgtagccacctagctgcaaaagcgcctgcagttgtagcctccatcaactaccgtttggcgccccagcacaagtacccagctcagtatgaggacggctatgacgccttgaaactcatcgatacacagaacactgacgttttacctgccaatactgacgtcagcagatgtttcatcgggggagatagcgccggaggcaacatagcccatcatttgacagtaagagctctcaagaacagcgaccacttcaagaaagtaaggatcgttggtattctctctctgcagccgtttattggaggggaagagagaacagaaccggagctgaggttgacaaacgagccgattctcaatatggaaggcgcggataaattgtggagggcctttctaccggagggtgcagacagaaatcaccctgcagtaaatgtgtttggtggtggatccaactctgaggcggctaaagaattgaagaatcttgaattccctactactttagtgattgttggaggaaatgatccattgcaagattggcataaaagatatgttgaatggttggagaattgtggtaaggaagtggagttaaccaagtatccaaatgcattccatgctttttatatatttccagaagtgccagagtttgatttggtacttcagaggctggcaatttttatccagaaacatatgcatcccaagtgaattttcctagctttttttctatatgattgaatttgaataatgtaatcatggaaatccacgcatcttctcagaaaaataagtcaatattactgtatgcgtttcactgttcttataagagatattggctgtgtaaattatgacaaataagcgggaataaatctttttaaggagcaaaaaaaaaaaaaaaaaaaaaa

SEQ ID NO: 371 - protein, 309 aa, Lamium amplexicaule
MANMIQKFQVLDIKTPAPATKVINNISVSTSDVQIDPSRSLWFRLFTPNINLDMKLPLIIYFHGGGFSNFGPDTKAFDDLCSHLAAKAPAVVASINYRLAPQHKYPAQYEDGYDALKLIDTQNTDVLPANTDVSRCFIGGDSAGGNIAHHLTVRALKNSDHFKKVRIVGILSLQPFIGGEERTEPELRLTNEPILNMEGADKLWRAFLPEGADRNHPAVNVFGGGSNSEAAKELKNLEFPTTLVIVGGNDPLQDWHKRYVEWLENCGKEVELTKYPNAFHAFYIFPEVPEFDLVLQRLAIFIQKHMHPK

SEQ ID NO: 372 - DNA, 1286 bp, Lamium amplexicaule
acaattccctaccaaacaaaaaaaaaaaaaaaaaaaaaaaaaaaaaaaaaaaaaaaaaaaaaaaaagagtgagagagagatgggttctcttggtcatgaagtagtggaagactgcctaggaattgttcaagtattgagcgacggctccatttcccggtcggagctcatcaactttccgatgacagttcatgatgacggcaccgccgtctggaaagactgtctatacgataacaaacacaacctccacctccgcctctacaagccccgctcccccgccgccgccgccaacctccccattctctacttcttccacggcggcggattctgcatcggctcccgaacctggccaaactgccacaactgctgcctccgcctcgcttccaagctacaagtcctagtggtagcaccggactaccgcctcgcgccggagcaccgcctccccgccgccgtagacgacgctatgacctccgtcaagtggctccagaaccaggctttgttatcaaaaagtggtggcggcgctgaggctgaggaatggttgggagaagggattgactttagcagggtttttatagtgggcgattcctccggcgggaacatggcccaccatctggcggtggagctcgggtgtggatccccgggtttggacccggttcgggttcggggatatgtattgatggctcctttttttggcggcacagagagaaccaaatctgaagcggaaggcccgcctgaacaattcttgaatctagacatacttgacagattttggaggctatcagtaccaagtggaggaacatcggaccacccattagcaaacccttttgggccaaaaagcccaaatttggaatttattgggctagatccaatacttgtgttagttggaggatgtgaagtgatgaaagacaggattgagcactacttcaagagaatgaaagagatgaagaaagagattgattatgtcgaatttcctggacaacaacatggcttcttcttgaaccaacctttctcagaactggcaaataatcttttggaaaagttaagtcattttatggataaaaattccctctagaaattaataccaaattttccctacttttttttttttttaatcatgttcaatcctgatagagataatattgtatgtaagctttgatccgttacataaggtgtatttaggtgttgtatgagaaatatattaggtgtgtgtgtttgtaatccatatataatataaatgtgaaaacacatatatttcatcttgttaaaagaaaaaaaaaaaaaaaaaaaaa

SEQ ID NO: 373 - protein, 329 aa, Lamium amplexicaule
MGSLGHEVVEDCLGIVQVLSDGSISRSELINFPMTVHDDGTAVWKDCLYDNKHNLHLRLYKPRSPAAAANLPILYFFHGGGFCIGSRTWPNCHNCCLRLASKLQVLVVAPDYRLAPEHRLPAAVDDAMTSVKWLQNQALLSKSGGGAEAEEWLGEGIDFSRVFIVGDSSGGNMAHHLAVELGCGSPGLDPVRVRGYVLMAPFFGGTERTKSEAEGPPEQFLNLDILDRFWRLSVPSGGTSDHPLANPFGPKSPNLEFIGLDPILVLVGGCEVMKDRIEHYFKRMKEMKKEIDYVEFPGQQHGFFLNQPFSELANNLLEKLSHFMDKNSL

SEQ ID NO: 374 - DNA, 1259 bp, Lamium amplexicaule
aaaaaaaaaaaaaaaaaaaaaaaaaagagtgagagagagagatgggttctcttggtcatgaagtagtggaagactgcctaggaattgttcaagtattgagcgacggctccatttcccggtcggagttcatcaactttccgatgacagttcatgatgacggcaccgccgtctggaaagactgtctatacgataacaaacacaacctccacctccgcctctacaagccccgctcccccgccgccgccgccaacctccccattctctacttcttccacggcggcggattctgcatcggctcccgaacctggccaaactgccacaactgctgcctccgcctcgcttccaagctacaagtcctagtggtagcaccggactaccgcctcgcgccggagcaccgcctccccgccgccgtagacgacgctatgacctccgtcaagtggctccagaaccaggctttgttatcaaaaagtggtggcggcgctgaggctgaggaatggttgggagaagggattgactttagcagggtttttatagtgggcgattcctccggcgggaacatggcccaccatctggcggtggagctcgggtgtggatccccgggttcggacccggttcgggttcggggatatgtattgatggctcctttttttggcggcacagagagaaccaaatctgaagcggaaggcccgcctgaacaattcttgaatctagacatacttgacagattttggaggctatcagtaccaagtggaggaacatcggaccacccattagcaaacccttttgggccaaaaagcccaaatttggaatttattgggctagatccaatacttgtgttagttggaggatgtgaagtgatgaaagacaggattgagcactacttcaagagaatgaaagagatgaagaaagagattgattatgtcgaatttcctggacaacaacatggcttcttcttgaaccaacctttctcagaactggcaaataatcttttggaaaagttaagtcattttatggataaaaattccctctagaaattaataccaaattttccctactttttttttttttaatcatgttcaatcctgatagagataatattatatgtaagctttgatccgttacatagggtgtatttaggtgttgtatgagaaatatattaggtgtgtgtgtttgtaatccatatataatataaatgtgaaaacacatatatttcatcttgttacatgaagtatgtatttgttgaaaaaaaaaaaaaaaaa

SEQ ID NO: 375 - protein, 329 aa, Lamium amplexicaule
MGSLGHEVVEDCLGIVQVLSDGSISRSEFINFPMTVHDDGTAVWKDCLYDNKHNLHLRLYKPRSPAAAANLPILYFFHGGGFCIGSRTWPNCHNCCLRLASKLQVLVVAPDYRLAPEHRLPAAVDDAMTSVKWLQNQALLSKSGGGAEAEEWLGEGIDFSRVFIVGDSSGGNMAHHLAVELGCGSPGSDPVRVRGYVLMAPFFGGTERTKSEAEGPPEQFLNLDILDRFWRLSVPSGGTSDHPLANPFGPKSPNLEFIGLDPILVLVGGCEVMKDRIEHYFKRMKEMKKEIDYVEFPGQQHGFFLNQPFSELANNLLEKLSHFMDKNSL

SEQ ID NO: 376 - DNA, 1238 bp, Lamium amplexicaule
acaattccctaacaaacaaaaaaaatagagtgagagagagtgatgggttctcttggtcatgaagtagtagaagactgcctaggaatcgttcaagtattgagcgacggttccatttcccggtcggagttcatcaactttccgatgacagttcacgatgacggcaccgccgtctggaaagactgtctatacgataacaaacacaacctccacctccgcctctacaagccccgctccccccctgccgacgccaacctccccattctctacttcttccacggcggcggcttctgcatcggctcccgaacctggccaaactgccacaactgctgcctccgcctcgcttcgacgctacaagtcctagtggtggcgccggactaccgcctcgcgccggagcaccgcctacccgcagccgtggacgacgctatgacgtccgtcaagtggctccagaaccaggctttgttatcgaaaagtggtggcggcgctgaggctgaggaatggttgggagaagggattgactttagcagggtttttatagtgggcgattcctccggcgggaacatggcccaccatctggcggtggagctcgggtgtggatccccgggtttggacccggttcgggttcggggatatgtattgatggctcctttttttggcggcacggagagaaccaaatctgaagcggaaggcccgcctgaacaattcttgaatctagacatacttgacagattttggaggctatcagtaccaagtggaggaacatcggaccacccattagcaaacccttttgggccaaaaagcccaaatttggaatttattgggctagatccaatacttgtgttagttggaggatgtgaagtgatgaaagacagaattgagcactacttcaagagaatgaaagagatgaagaaagagattgattatgtcgaatttcctggacaacaacatggcttcttcttgaaccaacctttctcagaactggcaaataatcttttggaaaagctaagtcattttatgggtaaacattccctctagaaattaataccaaattttccctactttttttttttttaatcatgttcaatcctgatagagataatattatatgtaagctttgatccgttgcataaagtgtatttaggtgttgtatgagaaatatattaggtgtgtgtgtttgtaatccatatataatataaatgtgaacacatatatatttcatccaaaaaaaaaaaaaaaaaaaa

SEQ ID NO: 377 - protein, 329 aa, Lamium amplexicaule
MGSLGHEVVEDCLGIVQVLSDGSISRSEFINFPMTVHDDGTAVWKDCLYDNKHNLHLRLYKPRSPPADANLPILYFFHGGGFCIGSRTWPNCHNCCLRLASTLQVLVVAPDYRLAPEHRLPAAVDDAMTSVKWLQNQALLSKSGGGAEAEEWLGEGIDFSRVFIVGDSSGGNMAHHLAVELGCGSPGLDPVRVRGYVLMAPFFGGTERTKSEAEGPPEQFLNLDILDRFWRLSVPSGGTSDHPLANPFGPKSPNLEFIGLDPILVLVGGCEVMKDRIEHYFKRMKEMKKEIDYVEFPGQQHGFFLNQPFSELANNLLEKLSHFMGKHSL

SEQ ID NO: 378 - DNA, 1174 bp, Lamium amplexicaule
ccattacggcctacttcactaaaattaatactttcttgatctcttaattcagcaggtcgatgtaaagtaaaatttgtgtacgccataagaaaactcttgttaaccccttcacaacttcaacaatggctgccaactcagacgagatactccacgatttctctcctatgcttaaagcatacaaagacggccgactcgaccggttatcaaaccaagacacggttcccgcatccgtcgatccaacaactggagttcaatccaaagacgtcgagatcgcaccggaaatcaacatatccgcccggattttcctgcccggaaacgccgatccgagccagaaactcccccttctcgtctacttccacggcggcggattcgccgtgcagtccgccttctctccgatgtaccaccaacacctcaatttcctggtcgcagaggctagaatagtagccgtatccgtgaattacagattggctccggagaacccgatgccgatccccttcgatgattcgtggctcgctctacaatggatcgcttcgaaatccacagaagaagaagcttggatcaggaactacgcagatctggatagggtctattttgggggagacagcgccggcgctaacatagcacacaacatggctatgcgggtcgggtcgggtatgaatctgaatctgaatccgcgtggaatttttctgaattgtccctacttttggggttgggatccaattggggacgaaattggtcatccattaaggggatttgttgaccaactgttggcgttgacttgccccggttcggggccggatgagccgtggttaaacccggctaaggatgggaatatttcgagtttaggggttaagaaagtgcttatttttgtggcggagaaggatattttgaaggataggggattgagttataaggagacgctgagcaagtgtgggtggggtggtgaagttgagtgtgtggagtttgcaggggaggatcatgttttcagcgtcttttttccacagagtcagaatggtgttgccatgctgaaaaaagtggcttcttttattaatcttgattaacaatcttatatactatgaatacttaccattttcgtttttgagtgaagtatgttaaaaatctttatatattgccaaatattggtatttcaaagaaaaaaaaaaaaaaaaaaaaa

SEQ ID NO: 379 - protein, 312 aa, Lamium amplexicaule
MAANSDEILHDFSPMLKAYKDGRLDRLSNQDTVPASVDPTTGVQSKDVEIAPEINISARIFLPGNADPSQKLPLLVYFHGGGFAVQSAFSPMYHQHLNFLVAEARIVAVSVNYRLAPENPMPIPFDDSWLALQWIASKSTEEEAWIRNYADLDRVYFGGDSAGANIAHNMAMRVGSGMNLNLNPRGIFLNCPYFWGWDPIGDEIGHPLRGFVDQLLALTCPGSGPDEPWLNPAKDGNISSLGVKKVLIFVAEKDILKDRGLSYKETLSKCGWGGEVECVEFAGEDHVFSVFFPQSQNGVAMLKKVASFINLD

SEQ ID NO: 380 - DNA, 1569 bp, Lamium amplexicaule
atgaatctgagttgaaaatggcaaaagaaatcgcttttgagatgtcgccacatttacgtatattcaccgacggaagcatcgaaaggagtactactcgctcccaatccacacctgtctccgacgaccccgtccgttccaaagacgtcatcattgactcccaaatttccgttcgcattttcgcgccgcgccaccactccaatccgccgcacaaaattccccttgtggtctacatccacggcggcgctttctgcgccgggtcaccatccagtccccctttccacaaattcgtctccaatttcgtccaaaaaggcaacgtaattgcagtttccgttgactacagattagctcccgaaaaccccccgccaatccccttcgacgactcgtggtccgcgttccagtggatcgcatcccacgcaaacggtaacggacccgaaccgtggctgaacgagcacgcggatttcgggcgcgtgttcgttggtggagagagcgcgggagcgaccatcgcgaacgacgtcgcgattagggcaggggttgagcgcgtggagattgtgggtatctttttagtgcatccgttcttcgggggtaaagaggtggacaaattgtacaggattctttgtcccgcgagtagcggacgcgacgatgatccgcggctgaacccggcggtggatccgcggatccgggaaatggcggggcggcgcgtgatattttttctggcggagaaggattcactgagggatagaggaagggcgtactatgagggtttgaagaggagcgcgtggagtgaggaagtggagattatggagactgaaggagaaggacattgttttcatttgttcgatcctagttgtgaaaaagccgtcgccatacttgaccaattaattgcattcttcgcttccaaataagcaggtgaaacatgggtaaatttgtttgtttggcccataattttaggtgggttgcaaaagtaggcttctaacttttcgggttgaaaattttggacccttaacttttttgattgacaatttaaggacaataatttttaaaagttataaatttagaccaaattaacctggtgtaacccaaattggacccacttccggatgaaattgggccaattagcccaatttttggcccaaaatcgggccaaatagcccgatttgggttaatttgggctgatttggtttaaaattgctatttaaaaattaagggtccaaaattgacagctcaacaagttggaggcctgtttttacatcccatccaaaattacgggccaaaaagcaattttacctgtgaaacatgattacgttaattaattatgagggaaaaataaaatagaactatcaaatcacgacacgctatgtaggagtgtttggttgtaataataaaattgtttggtagttgaaataagtatccaatttcccacgagagactccctagtctccccaagatatacggtagtacttagtagaatactatattgtctgtgtatttaattgatgatatctcatagacatttccttggaataataatttcaatttaatattgttaaaaaaaaaaaaaaaaaaaaaaaa

SEQ ID NO: 381 - protein, 294 aa, Lamium amplexicaule
MAKEIAFEMSPHLRIFTDGSIERSTTRSQSTPVSDDPVRSKDVIIDSQISVRIFAPRHHSNPPHKIPLVVYIHGGAFCAGSPSSPPFHKFVSNFVQKGNVIAVSVDYRLAPENPPPIPFDDSWSAFQWIASHANGNGPEPWLNEHADFGRVFVGGESAGATIANDVAIRAGVERVEIVGIFLVHPFFGGKEVDKLYRILCPASSGRDDDPRLNPAVDPRIREMAGRRVIFFLAEKDSLRDRGRAYYEGLKRSAWSEEVEIMETEGEGHCFHLFDPSCEKAVAILDQLIAFFASK

SEQ ID NO: 382 - DNA, 1062 bp, Lamium amplexicaule
actttgttgcaatctttctttgagtaccgcaggagatggagtccaaaccgacccaaataacccacgatctcccacctttcttccgcgtgcacaacactggccgcatcgaaagatactttgaccacgattttgtgccgtcgtcgcacgactcccaaaccggcgtcgcatccagagacgtcgttatctcgccggaaaacaacgtttccgttaggctatacctccccgcgaacaccgatcggaaactgccgctcatcctctacatccacggcggcgctttctcaatcgaatccgccttttccaccaggtaccacaactacgtcaattccctagcctccgaatccagatccgtagtcgtttcaatcgagtacagattagctccagagcacccaattcccgcctgttacgacgattgtttcgaggtcctcaaatggatcgagtccaaacccgacccgtggttaaccgaacacgcagatctggaacgggtattcatggccggggatagcgccggggctaatattgtccataacatggcgattcgggccgataggaaattttcgggcctgattctgattcacccgtttttcgggatcggcaagcccgacaagctgtgggaattcatctgccccggcacacccggggcgaatgatgtgaggttgaatccgatggcggatatggatcttttggtgaatctgggatccgatcgagtgctggtttgtgtggcggagaaggatttcttgagagagagaggttgcaagtattatgagggattgaagaaaagcaattggaaaggcgtggttgagttttttgagactcaaggtgaaggacatgtttttcatttacttgatcccccttcccctaataactctttttcattgatgaaccgaattgttgagttcatcaattctgcatctcgtgtaatgtcgaatgtgtagcaattctctattctggatttgggattaaatccgtttcatgacttcttcgctttttcattttagttccataattactttattttattcatttcatcccataccaatccaaaaaaaaaaaaaaaaaaaaaaa

SEQ ID NO: 383 - protein, 298 aa, Lamium amplexicaule
MESKPTQITHDLPPFFRVHNTGRIERYFDHDFVPSSHDSQTGVASRDVVISPENNVSVRLYLPANTDRKLPLILYIHGGAFSIESAFSTRYHNYVNSLASESRSVVVSIEYRLAPEHPIPACYDDCFEVLKWIESKPDPWLTEHADLERVFMAGDSAGANIVHNMAIRADRKFSGLILIHPFFGIGKPDKLWEFICPGTPGANDVRLNPMADMDLLVNLGSDRVLVCVAEKDFLRERGCKYYEGLKKSNWKGVVEFFETQGEGHVFHLLDPPSPNNSFSLMNRIVEFINSASRVMSNV

SEQ ID NO: 384 - DNA, 1269 bp, Lamium amplexicaule
attaatactttcttgatctcttaattcagcaggtcgatgtaaagtaaaatttgtgtacgccataagaaaactcttgttaaccccttcacaacttcaacaatggctgccaactcagacgagatactccacgatttctctccgatgcttaaagcatacaaagacggccgactcgaccggttatcaaaccaagacacggttcgcgcatccgtcgatccaacaactggagttcaatccaaagacgtcgagatcgcgccggaaatcaacatatccgcccggattttcctgcccggaaacgccgatccgcgccagaaactcccccttctcgtctacttccacggcggcggattcgccgtgcagtccgccttctctccgatgtaccaccaacacctcaatttcctggtcgcagaggctaaaatagtagccgtatccgtgaattacagattggctccggagaacccgatgccgatccccttcgatgattcgtggctcgctctacaatggatcgcttcgaaatccacagaagaagaagcttggatcaggaactacgcagatctggatagggtctattttgggggagacagcgccggcgctaacatagcacacaacatggctatgcgggtcgggtcgggtatgaatctgaatctgaatccgcgtggaatttttctgaattgtccctacttttggggttcggatccaattggggacgaaattggtcatccattaaggggatttgttgaccaactgttggcgttgacttgccccggttcggggccggatgagccgtggttaaacccggctaaggatgggaatatttcgagtttaggggttaagaaagtgcttatttttgtggcggagaaggatattttgaaggataggggattgagttataaggagacgctgagcaagtgtgggtggggtggtgaagttgagtgtgtggagtttgcaggggaggatcatgttttcagcgtcttttttccacagagtcagaatggtgttgccatgctgaaaaaagtggcttcttttattaatcttgattaacaatcttatatactatgaatacttacattttgatgcccacgtataatcattttcgtttttgagtgaagtatgttatatattgccaatggtatttcaaggtaaaatctttatatgttgatggtattgaggcttgaatttggaaagcccaagcatttgagaaatcaacttctctctgctcaataaaaattattagggaattttttaataaaaaaaaaaaaaaaaaaaaaaaaa

SEQ ID NO: 385 - protein, 312 aa, Lamium amplexicaule
MAANSDEILHDFSPMLKAYKDGRLDRLSNQDTVRASVDPTTGVQSKDVEIAPEINISARIFLPGNADPRQKLPLLVYFHGGGFAVQSAFSPMYHQHLNFLVAEAKIVAVSVNYRLAPENPMPIPFDDSWLALQWIASKSTEEEAWIRNYADLDRVYFGGDSAGANIAHNMAMRVGSGMNLNLNPRGIFLNCPYFWGSDPIGDEIGHPLRGFVDQLLALTCPGSGPDEPWLNPAKDGNISSLGVKKVLIFVAEKDILKDRGLSYKETLSKCGWGGEVECVEFAGEDHVFSVFFPQSQNGVAMLKKVASFINLD

SEQ ID NO: 386 - DNA, 1301 bp, Lamium amplexicaule
atcatttaagcatactgtactcgaacaacatatttacatatattcgaaaatttatttagctccagttatccttatttcatatctatcacaatggtacaagaaaagaaagtaatagacgaagtgtccggttggctaacaatgtacgacgacggttcagtcgaccgtacatggaccggaccgccggaagtcaaattcatgtccgacgccgtaccaacgcacaccaacttcatcgacggcgtcgccaccgccgacgtcacctccggcaacctcaaactccgcctctacctgccggaaacccaagaaaacgaccccgaaaaactccccgtcctcctccacttccacggcggcggcttctgcatcagccaagccgattggttcatgtactacgccgtgtacacgcgcctcgcgcgtgaaacccgcgccatcgtcgtgtcggtctacctcccactcgccccagagcaccgcctcccggcggcatgcgagaccggtttcgccgccctcatgctgctacgcgacaccgccgcctccggaggcggcggcgagtcgctacacgattggctgactgaccgggccgattttggccgggtttttctaatcggagatagctccggcgggaacatagtccactacgtggcggcgcgtgcgggcgagttagacatgaccccactacgtctcggcggcgccatcccgatacaccccgggttctgccggtcgacccggagtaagtcggagatggagatgccggagacgccgttcctgacgctggcgatggtggataagtttttgagcttatctttgccggtgggtgagacgaaggaccaccagttgacgtgtccgatgggggaggcggcgccgccgctggaggcggcagcgctgccgccgtacctttactgcgtggcggatcaggacctgatgaaggatacagaaatggagttctatgaggccatgaaaagggctaagaaggatgtggagcttttgattaataatggggtgggccatagcttttatcttaacaagattgcggtggatttggatccgattacggcggagcagacccggaaactgtttaaagggatcaaagaattcattgataggcattaagtttggtgatcaattattgaccggagctactttaattggtgaaaaataaaatcgagaataggaattatgtctattgtttgttgttgttagtgcatggtggggtcttgttttaattggtgtttctatcgtgtgtatttgttgttttaaattatatatatgttcaattatatgcaaaaaaaaaaaaaaaaaaaaaaaaaaaa

SEQ ID NO: 387 - protein, 336 aa, Lamium amplexicaule
MVQEKKVIDEVSGWLTMYDDGSVDRTWTGPPEVKFMSDAVPTHTNFIDGVATADVTSGNLKLRLYLPETQENDPEKLPVLLHFHGGGFCISQADWFMYYAVYTRLARETRAIVVSVYLPLAPEHRLPAACETGFAALMLLRDTAASGGGGESLHDWLTDRADFGRVFLIGDSSGGNIVHYVAARAGELDMTPLRLGGAIPIHPGFCRSTRSKSEMEMPETPFLTLAMVDKFLSLSLPVGETKDHQLTCPMGEAAPPLEAAALPPYLYCVADQDLMKDTEMEFYEAMKRAKKDVELLINNGVGHSFYLNKIAVDLDPITAEQTRKLFKGIKEFIDRH

SEQ ID NO: 388 - DNA, 1260 bp, Lamium amplexicaule
agtgctacaaaaactcccaatacaaataatatcaataccatgtgtgcatttttctcagtactattcttattccttcatttactttcactctcactttcagcaacctttgcatctacaaattcttcttcagagatattgtacgaaattgataccatcataagagtgtacaaaaacggcactcttgaaagactatcaggaacacagactcttccaccgtcgtttgatccgacggttggtgttcaatccaaagatatcaccattgatcccacgttaaatatttcagctagactttacctcccaataaacgcacataaatttcctcttcctcttctagtctacttccacggcggtggatttctcactggatccccattctctacaattcaccacacttacttgaattctctcgtcggaaaagctgacgtcgtcgccgtatctgttaattaccgattagcccctgaacactatctccctattgcttatcaagattcttggctcgccctaaaatgggtattctcccactctaaaggtaatggaacggaggcatggctcacaaaatacgtcgatttcgggcgtgtttacttgggcggagacagcgcaggcggcaacattgcacacaacatggctattcgggtcgggtctgagagaatcggtgaggtgcatggtatgtatctaaattgcccccatttttgggggacccacccgattgggaatgaagctaataaccccaagggagaagcctgggtggagagtatctggatccatgcatatccaaattctaccgggtttgacgaccctttatcgaatccagctatggatccggatctttctaagttagggtgcaaaaaggtggtggtttatgttggacaacttgatatattaagagatagggggtggtattatgctgagacattgaaaaggagtgagtgggatggaattgtgaaggttgtggaggtcatgggggaagatcatgccttcaatattaatcaccccaattcaccaaaggccaagaaaatgctcaaccaagtggctttgtttctcaatgataaagggcccgactatatacccctccaaacttattagttatgtcaatgatcatattagtttcaataaatttttattgaaatttagttgatatatgcatgtgttgaaaatttgttgggcaaaatctcaatttttcttatgtgaatcaggtttcgataaaaaagtatcgaaatctgatctatttttttaacaaaaatatgtcgaaaatatggtggg

SEQ ID NO: 389 - protein, 347 aa, Lamium amplexicaule
MCAFFSVLFLFLHLLSLSLSATFASTNSSSEILYEIDTIIRVYKNGTLERLSGTQTLPPSFDPTVGVQSKDITIDPTLNISARLYLPINAHKFPLPLLVYFHGGGFLTGSPFSTIHHTYLNSLVGKADVVAVSVNYRLAPEHYLPIAYQDSWLALKWVFSHSKGNGTEAWLTKYVDFGRVYLGGDSAGGNIAHNMAIRVGSERIGEVHGMYLNCPHFWGTHPIGNEANNPKGEAWVESIWIHAYPNSTGFDDPLSNPAMDPDLSKLGCKKVVVYVGQLDILRDRGWYYAETLKRSEWDGIVKVVEVMGEDHAFNINHPNSPKAKKMLNQVALFLNDKGPDYIPLQTY

SEQ ID NO: 390 - DNA, 1515 bp, Lamium amplexicaule
atttatactctctttccactccagtaccttcttcaccgcaaaacccacttctttttctctctctacaaaacatgtttaccaccaatggctacctcctcatctttctagcactagcagcaatcttctccgtttactcagtttccgcagaaactccgacgaactcctcagatccaatcctctacgacatttaccccttcataagagtgtacaaagatggcagaattcagagattcatcggccaaggctatctccccgcttcagtggatccaaccaccggcgtccactccaaggacgtcaaattctccaatctctccgccaggctttacctccccaaaaacgccgccgcatccggccgcaaacttccactccttatctacttccatggcggcggattcttcaccgaatccgccttctccccaacctaccacaaccacctcaacgcactcgtcgccaaatccagatccatcgcggtctcggtaaattaccgattagcccccgagcaccccctccccatcgcctacgaagattcctggctagcactacaatggactttctctcacttaagaggcaacggcgcagaaccctggcttaaaaaatacgccgatttcggtaacttttacctcggcggggacagcgccggcgccaacctggcgcacaacatggcgatacgggtcggggtgaagaatccgggacctggaatcgtactccagggtatgttcctaaactgtcccttttttctggggaagaaagtgattggtaatgaagcgacggcggcgaatgtgtattcggagactttgaatcagagactgtggctttacgcgtacccgaatagcaagtcgggtctggatgacccgctggtgaacccgggtatgtgcccgcttatgaagaatgtgggctgtaaacgagtactggtttatgtggctgggaatgatgttttgaagtatagggggtggtactataaggaggttttggagaaaagtgggtggaatggagaggtgaaagttgtggaggttaaaggagaaaaccatgatttcaatgtggttagcccgacccagaagagttcggttcttatgctccgggtcttggcttcctttctcagtcattcataatcttttcggggggagtgacggataggtacaacattggggaaattttaactttgaaatccaagaaaaatttctagtaaacttgaccctatttttgtactggaaatcaattattccacttttttcccttccaacaccgcacgacgccacacaaccgtattggtcaatggtgtgaccttactaccacttgaattttctgcttcatttggtttttagtttataaaaaattgtcttgaaatcagaaaaaaatagttatcttctttgtctggtactgttgcaataatttaaatttaagatcaatatttaattacgacagattattggtgtattttatgtaccattggtagctggattcctttaaatggtattcacatttcacatctcaaaaaaaaaaaaaaaaaaaaaaaaa

SEQ ID NO: 391 - protein, 345 aa, Lamium amplexicaule
MFTTNGYLLIFLALAAIFSVYSVSAETPTNSSDPILYDIYPFIRVYKDGRIQRFIGQGYLPASVDPTTGVHSKDVKFSNLSARLYLPKNAAASGRKLPLLIYFHGGGFFTESAFSPTYHNHLNALVAKSRSIAVSVNYRLAPEHPLPIAYEDSWLALQWTFSHLRGNGAEPWLKKYADFGNFYLGGDSAGANLAHNMAIRVGVKNPGPGIVLQGMFLNCPFFLGKKVIGNEATAANVYSETLNQRLWLYAYPNSKSGLDDPLVNPGMCPLMKNVGCKRVLVYVAGNDVLKYRGWYYKEVLEKSGWNGEVKVVEVKGENHDFNVVSPTQKSSVLMLRVLASFLSHS

SEQ ID NO: 392 - DNA, 1621 bp, Lamium amplexicaule
atgaatctgagttgaaaatggcaaaagaaatcgcttttgagatgtcgccacatttacgtatattcaccgacggaagcatcgaaaggagtactactcgctcccaatccacacctgtctccgacgaccccgtccgttccaaagacgtcatcattgactcccaaatttccgttcgcattttcgcgccgcgccaccactccaatccgccacacaaaattccccttgtggtctacatccacggcggcgctttctgcgccgggtcaccatccagtccccctttccacaaattcgtctccaatttcgtccaaaaaggcaacgtaattgcagtttcggttgactacagattagctcccgaaaaccccctgccaatccccttcgacgactcgtggtccgcgttccagtggatcgcatcccacgcaaacggtaacggacccgaaccgtggctgaacgagcacgcggatttcgggcgcgtgttcgttggtggagagagcgcgggagcgaccatcgcgaacgacgtcgcgattagggcaggggttgagcgcgtggagattgtgggtatctttttagtgcatccgttcttcgggggtaaagaggtggacaaattgtacaagattctttgtcccgcgagtagcggacgcgacgatgatccgcggctgaacccggcggtggatccgcggatccgggaaatggcggggcggcgcgtgatattttttctggcggagaaggattcactgagggatagaggaagggcgtactatgagggtttgaagaggagcgcgtggagtggggaagtggagattatggagactgaaggagaaggacattgttttcatttgttcgatcctagttgtgaaaaagccgtcgccatacttgaccgattaattgcattcttcgcttccaaataagcaggtgaaacatgggtaaatttgttttttttggcccggaaatttaggtgggttgcaaaggtaaaagtaggcttctaacttttcggattggaaattttggaccctcaatttttttgactgacaatttaaggacaataacttttaaaagttataaatttaggtcaaattaacccgatgtaacccaaattggacccacttccgggatgaaattgggtcaattagcccaattttcggcccgaaatctttcaaaatcgggccaaatagctcgatttgggtcagtttgggctgatttggcttgaaattgctattttaaaaaattatgggtccaaaattgatagcccaaaaagttggaggcctatttttataatccatccaaaattacggggccaaaaagcaattttacttggtgaaacatgattacgttaattaattataaggggaagatgattacgttaattaattatgagggaaaaataaaatagaactatcaaatcacgacacgctatgtaggagtgtttggttgtaataataaaattgtttggtagttgaaataagtatccaatttcccacgagagactccctagtctctccaagatgatacggtagtagaatgctatgttgtctgtgtatttaattgatgatatctcatagacatttccttggaataataatttcaatttaatattattacaataaaaaaaaaaaaaaaaaaaaaaaaa

SEQ ID NO: 393 - protein, 294 aa, Lamium amplexicaule
MAKEIAFEMSPHLRIFTDGSIERSTTRSQSTPVSDDPVRSKDVIIDSQISVRIFAPRHHSNPPHKIPLVVYIHGGAFCAGSPSSPPFHKFVSNFVQKGNVIAVSVDYRLAPENPLPIPFDDSWSAFQWIASHANGNGPEPWLNEHADFGRVFVGGESAGATIANDVAIRAGVERVEIVGIFLVHPFFGGKEVDKLYKILCPASSGRDDDPRLNPAVDPRIREMAGRRVIFFLAEKDSLRDRGRAYYEGLKRSAWSGEVEIMETEGEGHCFHLFDPSCEKAVAILDRLIAFFASK

SEQ ID NO: 394 - DNA, 995 bp, Lamium amplexicaule
ctttgagtaccgcaggagatggagtccaaaccgacccaaataacccacgatctcccacctttcttccgcgtacacaacactggccgcatcgaaagatactttgaccacgattttgtgccgccgtcgcacgactcccaaaccggcgtcgcatccagagacgtcgttatctcgccggaaaacaacgtttccgttaggctatacctccccgcgaacaccgatcggaaactgccgctcatcctctacatccacggcggcgctttctcaatcgaatccgccttttccaccaggtaccacaactacgtcaattccctagcctccgaatccagatccgtagtcgtttcaatcgagtacagattagctccagagcacccaattcccgcctgttacgacgattgtttcgaggtcctcaaatggatcgagtccaaacccgacccgtggttaaccgaacacgcagatctggaacgggtattcatggccggggatagcgccggggctaatattgtccataacatgacgattcgggccgataggaaattttcgggcctgattctgattcacccttttttcgggatcggcaagcccgacaagctgtgggaattcatctgccccggcacacccggggcgaatgatgtgaggttgaatccgatggcggatatggatcttttggtgaatctgggatccgatcgagtgctggtttgtgtggcggagaaggatttcttgagagagagaggttggaagtattatgagggattgaagaaaagcaattggaaaggcgtggttgagttttttgagactcaaggtgaaggacatgtttttcatttacttgatcctccttcccctcataactctttttcattgatgaaacgaattgttgagttcatcaattctgcatctcgtgtaatgtcgaatgtgtagcaattctctattctggatttgggattaaatccgtttcatgacttcttcactttttcgaaaaaaaaaaaaaaaaaaaaaaa

SEQ ID NO: 395 - protein, 298 aa, Lamium amplexicaule
MESKPTQITHDLPPFFRVHNTGRIERYFDHDFVPPSHDSQTGVASRDVVISPENNVSVRLYLPANTDRKLPLILYIHGGAFSIESAFSTRYHNYVNSLASESRSVVVSIEYRLAPEHPIPACYDDCFEVLKWIESKPDPWLTEHADLERVFMAGDSAGANIVHNMTIRADRKFSGLILIHPFFGIGKPDKLWEFICPGTPGANDVRLNPMADMDLLVNLGSDRVLVCVAEKDFLRERGWKYYEGLKKSNWKGVVEFFETQGEGHVFHLLDPPSPHNSFSLMKRIVEFINSASRVMSNV

SEQ ID NO: 396 - DNA, 1247 bp, Lamium amplexicaule
aattatcataacataaaaacaaaacaaaaaaacttacaaaaataattaagcaattttcttaattaattactacaatggcggaagcaacgaaagtggtggttgatcacgtcccaggatggatcacatactttgaggacggctccgtcgaccggacctgggtcggtccaccggaggcccggttcatgatcgaaccggtgccggcgcatgaccacttcgtggacggcgttgcggtcaccgactttgccgcccacgacggtttgaaagtccggatttacaaaccggagcggcgggaaaccgacccggaaaaactgccggttctgctacacttccatggggggtggttttgcgtgagcgaagctgattggtacatgtactacgccgtgtgcacgcgccttgcgcgtgagacgagagccgtcatcgtgtcggcctacctccggaaggcgccggagcaccgcctcccggcggcgtgcgacgacggtcatgaagccctcctgtggctacgctccgtcgcgaagggcgaggccagccacccgtggctgaatgatgacgtcgatttcaacagggtttttctcataggtgacagctccggcggcaacatagtccacgaggtggcggcgcgtgcaggcaaggaggacataacccctctaagactcgccggagcaatcccgatccacaccgacttctgccgctctaagcggagcaagtcagaactagaggaaacacaaacaccctttctaaacctaaacatgatggacgagttcttaaccatggcgctgccggtgggggccaccaaggaccaccccataacttgtccgatgggggaggcggcgccgccggtggaggagctgacgctgccgccgtacctttactgcgtggcggaccatgacctgataagggataccgaaatagaattctatgaagccatgaaaaaggctaacaaagaagtggagctttttatgagccatgatgtgggccatagcttttatcttaacaagaagaatgttgatacgaagcctaaaattgctgaggagactcaaaagctcttcgatgcgatcaaggaattcgtcgacaagcgttgatcaattttaaattgatgattttgtgtgtgtgtgtgttttttttttttctatttagtttttttaatttcgcatgggtttgacgtgggttgactgaaaatgtgtggttatgttggttgtgtaatgaaatttaatcacatttccctcccaaaaaaaaaaaaaaaaaaaaaa

SEQ ID NO: 397 - protein, 334 aa, Lamium amplexicaule
MAEATKVVVDHVPGWITYFEDGSVDRTWVGPPEARFMIEPVPAHDHFVDGVAVTDFAAHDGLKVRIYKPERRETDPEKLPVLLHFHGGWFCVSEADWYMYYAVCTRLARETRAVIVSAYLRKAPEHRLPAACDDGHEALLWLRSVAKGEASHPWLNDDVDFNRVFLIGDSSGGNIVHEVAARAGKEDITPLRLAGAIPIHTDFCRSKRSKSELEETQTPFLNLNMMDEFLTMALPVGATKDHPITCPMGEAAPPVEELTLPPYLYCVADHDLIRDTEIEFYEAMKKANKEVELFMSHDVGHSFYLNKKNVDTKPKIAEETQKLFDAIKEFVDKR

SEQ ID NO: 398 - DNA, 1374 bp, Lamium amplexicaule
atctttaaaaaaagaacccctaaaaataactaagcaattttcttctcaattaattactaaaatggcggaagcaacgaaagtggtggttgatcacgtccccggatggatcacatactttgaggacggctccgtcgaccggacctgggtcggtccaccggaggcccggttcatgatcgaaccggtgccggcgcatgaccacttcgtggacggcgttgcggtcaccgactttgccgcccacgacggtttgaaagtccgaatttacaaaccggagcggcaggaaaccgacccggaaaaactgccggttttgctacacttccatggggggtggttttgcgtgagcgaagctgattggtacatgtactacgccgtgtgcacgcgccttgcgcgtgagacgagagccgtcatcgtgtcggcctacctccgtaaggcgccggagcatcgcctcccggcggcgtgcgacgacggtcatgaagccctcctgtggcttcgctccgtcgcgaagggcgaggccagccacccgtggctgaatgatgacgtggatttcaacagggtttttctcataggtgacagctccggcggcaacatagtccacgaggtggcggcgcgtgcaggcaaagaggacataacccctctaagactcgccggagcaatcccgatccacaccgacttctgccgctctaagcggagcaagtcagaactagaggaagcacaaacaccctttctaaacctaaacatgatggacgagttcttaaccatggcgctgccggtgggggccaccaaggaccaccccataacttgtccgatgggggaggcggcgccgccggtggaggagctaacgctgccgccgtacctttactgcgtggcggaccatgacctgataagggataccgaaatagagttctatgaagccatgaaaaaggctaacaaagaagtggagctttttatgagccatgatgtgggccatagcttttatcttaacaagaagaatgttgatacgaagcctaaaattgctgaggagactcaaaagctctttgatgcgatcaaggaattcgtcgacaagcgttgatcaattctaatcgatgattttgtgtgtatgtgtgtgtgttttttttttttttctatttagtttttataatttcgcatgggtttgacgtgggttgattgaagatgtgtggttatgttggttgtgtaatgaaatttaatcacatttccctctcataacttccgtgttttttttaatcacataactccttaattggttcgaatttggtatcaaattattggtcactagattttgaagtacaatgatatcactgaatacatgtaatagtattaatatataaatatatataatgttttaagtttcaaaaaaaa

SEQ ID NO: 399 - protein, 334 aa, Lamium amplexicaule
MAEATKVVVDHVPGWITYFEDGSVDRTWVGPPEARFMIEPVPAHDHFVDGVAVTDFAAHDGLKVRIYKPERQETDPEKLPVLLHFHGGWFCVSEADWYMYYAVCTRLARETRAVIVSAYLRKAPEHRLPAACDDGHEALLWLRSVAKGEASHPWLNDDVDFNRVFLIGDSSGGNIVHEVAARAGKEDITPLRLAGAIPIHTDFCRSKRSKSELEEAQTPFLNLNMMDEFLTMALPVGATKDHPITCPMGEAAPPVEELTLPPYLYCVADHDLIRDTEIEFYEAMKKANKEVELFMSHDVGHSFYLNKKNVDTKPKIAEETQKLFDAIKEFVDKR

SEQ ID NO: 400 - DNA, 1301 bp, Lamium amplexicaule
aaacttgtacaacaccaaacaatcccttaaaaaaaacactagcctagtaagtagtagtaacacttaacaaccatggtgctccaggaaaaaaaggttgttgatgaggtttcgggttggctccgggtttacgaagacgggtcagtggaccggaccttttttggcccacccgcggccaagttcatggtcgacccggtcccggcccatgaggagttcattgacggggttgcgacatttgatgtaacgcccaatatgggtcctcgggtccggatctatttgcccgagaccggaccttcggatgatccgaatgagaagctgcccgtgattgtccactttccgggtggcgggttttgcatctcggaagctgattggttcatgtactatgcggtttactctaggctggcccggtctgcccgggctattattgtctcggtttacctacggctcgcccccgagaaccggctcccggctgcggttgatgacgggttttcggccctgttatggctcacttccctcgcccgggccgagtcccacgagccgttgttcacgggtcgggctgattttgggcgggtcttcctaattggggatagttcgggtggtagtttggtccatgaagtggcagttcgggccgggaaatcagacttaagcccactaaaattagccgggtcaatcccggttcatccgggtgtttgccggtccacaaggagccggtctgagttggaaatgccccaaacgccctttttaacccttgacatggtggacaagtttttgaacctggcattgccaaaaggaagtaacaaggaccacccaattacgtgtccgatggggcccacggccccgaagctaggtggggtccgcctaccgccgatcatgtattgcgtggcggataaggatttgttcattgatactcaaatggagttctatgaggcattgaaaaaggatgggaaagaagttgaggtgtttgttagtgaaaacatgagtcatagcttttacctcaataagttggctgttgagtatgatcctgaaactaaggcccaaactgaaaagctctttgaagggatagttggttttgtgaagaggcattgaattgatagctattgggaattagctactacaatgcatttatgaatatttgatgtgtttgtgtggtgtgaaaataatgacttgtaatataatgatggttgtcttcacttttctttgttaattgcgtactatgtaggagtgtgtaactaataattgttgtcctcaaattttagttatatgcacggttcccaaatttaatatgaaaaaaaaaaaaaaaaaaa

SEQ ID NO: 401 - protein, 336 aa, Lamium amplexicaule
MVLQEKKVVDEVSGWLRVYEDGSVDRTFFGPPAAKFMVDPVPAHEEFIDGVATFDVTPNMGPRVRIYLPETGPSDDPNEKLPVIVHFPGGGFCISEADWFMYYAVYSRLARSARAIIVSVYLRLAPENRLPAAVDDGFSALLWLTSLARAESHEPLFTGRADFGRVFLIGDSSGGSLVHEVAVRAGKSDLSPLKLAGSIPVHPGVCRSTRSRSELEMPQTPFLTLDMVDKFLNLALPKGSNKDHPITCPMGPTAPKLGGVRLPPIMYCVADKDLFIDTQMEFYEALKKDGKEVEVFVSENMSHSFYLNKLAVEYDPETKAQTEKLFEGIVGFVKRH

SEQ ID NO: 402 - DNA, 1478 bp, Lamium amplexicaule
gtcccaaagaagaaaaaataatcaaatttgcatctttttcttctctattttccactctaatcaaaaatggctaccgccacgatcgacccatctcatacccttcaaatcgccaccaaaaaatcccaaacccgattactaaccgaagaaatcccgggcctcattcgagtccacaaggatggccacgtggaccgcccccaggtcatgccatgtgtcccatgctcattggctcctgatctcgggctcacgtgcacagacctgatcatcgacaagtacaccaacctctggtcacgcatctacatcccaaacgccgccgccgaaaagaccaaactacccctcctagtatacttccacggcggcggcttctgcgtcggcgccgcctcttggagctgctaccacgattttctatcgaaactagcctccaaaaccccctgcgccgttgtgtctgtcaactaccgcctggcgccggaaaaccccctcccggcggcttacgaggacggcgccagggcggtggcgtggctgaagcaacaagagagtggctttagcaacaaatggtgggccagcaaatgtgacttctctagaatcttcctcgcaggcgatagcgctggagcgaatatcgcctacaatgtcgccgtcggccttaggccgactgcgacgattgttaaagggttggtgctgatccaacccttttttgggggcgaggcgaggaccgggtccgagaaatactcggtccagccccctcgctccgccctaacgctggccgcttcagatacgtactggcggctggcgctgcccggcgggtcagaccgcgatcacccgtggtgcaacccgcggatggccgctggggcggcggtggaactgcgggggatggatgtgatggtgtgtgtgtcggagatggatatattgaaggataggaacttggagtggtgtgcaagtctggggagtaaaggggtgagagttgaacaagtggcgtgcaaaggagttgggcatgcatttcagattcttgataactcgcgcgtggcgcaaacacgacttcatgaattgctttgtcgtgcaaagaatttcgttaccagataaatatagttgttattcgaatcgagtagattggaagttaagcaaatgctcgagccaaattcgagtaggttggaagatcaagtgttcgagtagaattcgtactccaaaaactcgaatcgaataacaagactatagtcttcttcttgatttaggttttgattttattgaaagtaggtgggagtgaagtagacaataatgtatggttagttatatgtgaaagttggattattaggctacaaattggtttcaagttgtattttaatatagattaggtgatgcttgtgtaatttaaggcaatagtaaaagacttggagatgagatatttttgtataaattttttctccaattgtattattgatatgcaataattgttatgtattccaaaaaaaaaaaaaaaaaaaaaaaaa

SEQ ID NO: 403 - protein, 335 aa, Lamium amplexicaule
MATATIDPSHTLQIATKKSQTRLLTEEIPGLIRVHKDGHVDRPQVMPCVPCSLAPDLGLTCTDLIIDKYTNLWSRIYIPNAAAEKTKLPLLVYFHGGGFCVGAASWSCYHDFLSKLASKTPCAVVSVNYRLAPENPLPAAYEDGARAVAWLKQQESGFSNKWWASKCDFSRIFLAGDSAGANIAYNVAVGLRPTATIVKGLVLIQPFFGGEARTGSEKYSVQPPRSALTLAASDTYWRLALPGGSDRDHPWCNPRMAAGAAVELRGMDVMVCVSEMDILKDRNLEWCASLGSKGVRVEQVACKGVGHAFQILDNSRVAQTRLHELLCRAKNFVTR

SEQ ID NO: 404 - DNA, 1348 bp, Linum perenne
acgccacaacaacttttctctcttcttcaatcttcatcatctcctctcctccataaattaacctcacaaacagagtcccgttttaatttattcagtttactacacaaggccggccgccatgtccaccaccggtgctgctggttctatgacccctcctcccccagctgcacttccctggagaactcgtctcgctgtttcctttatttccaccttatctgataccgcacgccgccacgacggcactgttaaccgccgtctcctcaatttccttgatctcaagtccccttcctcctccactcctatccaatccatcgtctcctccgatgtcaccgttgatgcctctcgcaatctatggttccgcctctacactcccaccaccacctctaccactctcccgatcttcgtttttttccacggtggaggctttgccttcctcagccccgccagcgtcggctacgacctcgtctgccgccgattcgcccggactctcccggcgatcgttgtctccgtcaactaccgtctcactccggagcaccgattcccctgccagtacgaagacggattcgagatcctccgattcctcgacggagccgcctcggtattgcctcccaatgccgacataacaaagtgtttcctcgctggtgacagcgccggagcaaatttagcgcaccacgtcgcggttagggttgggcgggctggtgatgataaattccggagactccgagtggttggacaagtgtcgattcagcccttttttggaggggaagagagatcggaagctgagatccgtttaggaagtaactcggtgcttgtttctctgcccaggacagattggctatggaaagcattcctaccggaagggtctaacagggaccatgaggcggcgaacgtgagcggggagaatgcggaggacatatcaggtgtggaatacccagagacgatggtgatagtgggtggtttagatccgctgcaggactggcagagaaagtattacgaatggctgaagaaatgggacaaggaggcaacgctgatagagtacccgaatatgatacatgctttttatatgttcccggaattgccggaagcggcccaggttttcactcaggtgaaggattttgttaccaggaggaagtcagccgcctgataaataaaataaaaaagtggtcgtttttttagttttaaattttaataattttgtggtggtgacgtgaggatttaatgatggctattatcgccgccggactgaaaaaatggaaaataatatcttttttccaaattgtgtaagcttttgttttgttttgaggtgaattttggatttttgtgtgattcaaaaaaaaaaaaaaaaaaa

SEQ ID NO: 405 - protein, 341 aa, Linum perenne
MSTTGAAGSMTPPPPAALPWRTRLAVSFISTLSDTARRHDGTVNRRLLNFLDLKSPSSSTPIQSIVSSDVTVDASRNLWFRLYTPTTTSTTLPIFVFFHGGGFAFLSPASVGYDLVCRRFARTLPAIVVSVNYRLTPEHRFPCQYEDGFEILRFLDGAASVLPPNADITKCFLAGDSAGANLAHHVAVRVGRAGDDKFRRLRVVGQVSIQPFFGGEERSEAEIRLGSNSVLVSLPRTDWLWKAFLPEGSNRDHEAANVSGENAEDISGVEYPETMVIVGGLDPLQDWQRKYYEWLKKWDKEATLIEYPNMIHAFYMFPELPEAAQVFTQVKDFVTRRKSAA

SEQ ID NO: 406 - DNA, 1216 bp, Linum perenne
aagacgaattcggaagataattcactaattcactatcctccctctcaaatcgcaatttttctctctccaccatgtcggcaacgggaactcctcccgccgacggtgacttcgaagactgtttcggcatcctccgagtctacaaagacggctcaacctggcgatccacccaaccaagcttcaacatcccggtcaacgcccctccttccgttacgaccaaagacgcaacctttgacgatcgaaacaacctcaaactccgcatctacaaacccacttcttccacaaatctgcttccgatcatcgtccacttccacggcggcggcttctgcctcggctccatcgacgagcccttctcccagaactgctgcttccgcctcgcctcccagctccaagccgtcgtcatctccccggcttaccggctggctccggagaaccggctcccggccgcgattgacgacggctacgcggctctaaaatggctccaggctcaggcggctgagccggataattggctgagtgaggtggccgatttcgggaaggtgtttgttgtcggggaatcggccggcgcgaatattgctcatcatttggcggttcgggtcggagccgggtcggttgacttgggtccggttaagatgaaaggctatgtgttgttgtatccgttcttcggtggtgttgtacggactaaatctgaagctgaggctcccaaggatatgcctttgaatcttgattccattgactggttctttcgacattctgtaccagttggcgaaacatcagattatcctgtagtgaacccgttcggacctgaaagcaaggacctcgcaccggtggagcttgatccaatgcttgtggttgccggtggaagtgatgttctagtagatcgaatcaggcactatgtcgagaagcttaagcttatggggaagacgattcagtacgccgagtttgaagggcagcatcatgcgttcttaaccgctgctccggactctgatgctgcaaaatctgttatggaactcatcaaggaattcgtcaccgagaattcaaaatgaaaacagaagaatcaagacattattttgctacttgcattgcagatgttatcttgggatgttttaagaatcgttgtatttcaataagctcgggttgttatgatctctcgggatgtcttaagaatcgttgtatttcaataaatcgggttgttatgaaagaaaaaaaaaaaaaaaaa

SEQ ID NO: 407 - protein, 323 aa, Linum perenne
MSATGTPPADGDFEDCFGILRVYKDGSTWRSTQPSFNIPVNAPPSVTTKDATFDDRNNLKLRIYKPTSSTNLLPIIVHFHGGGFCLGSIDEPFSQNCCFRLASQLQAVVISPAYRLAPENRLPAAIDDGYAALKWLQAQAAEPDNWLSEVADFGKVFVVGESAGANIAHHLAVRVGAGSVDLGPVKMKGYVLLYPFFGGVVRTKSEAEAPKDMPLNLDSIDWFFRHSVPVGETSDYPVVNPFGPESKDLAPVELDPMLVVAGGSDVLVDRIRHYVEKLKLMGKTIQYAEFEGQHHAFLTAAPDSDAAKSVMELIKEFVTENSK

SEQ ID NO: 408 - DNA, 1207 bp, Linum perenne
aattcactaattcactatcctccctctcaaatcgcaatttttctctctccaccatgtcggcaacggaaactcctcccgccgacggtgacttcgaagactgtttcggcatcctcagagtctacaaagacggctcaacctggcgatccacccaaccaagcttcaacatcccgatcaacgcccctccttccgttacgaccaaagacacaatctttgacctccgaaacaacctcaaactccgcatctacaaacccacttcttccacaaatctgcttccgatcatcgtccacttccacggcggcggcttctgcctcggctccatcgacgagcccatctgccagaactgctgcttccgcctcgcctcccagctccaagccgtcgtcatctccccggcttaccggctggctccggagaaccggctcccagccgcgattgacgacggctacgcggctctaaaatggctccaggctcaggcggctgagccggataattggctgagtgaggtggccgatttcgggaaggtgtttgttgtcggggaatcggccggcgcgaatattgctcatcatttggcggttcgggtcggagccgggtcggctgacttgggtccggttaagatgaaaggctatgtgttgttgtatccgctctttggtggtgttgtacggactaaatctgaagctgaggctcccaaggatatgcctttgaatcttgattccattgactggttctttcgacattctgtaccagttggcgaaacatcagattatcctgtagtgaacccgttcggacctgaaagcaaggacctcgcaccggtggagcttgatccaatgcttgtggttgccggtggaagtgatgttctagtagatcgaatcaggcactatgtcgagaagcttaagcttatggggaagacgattcagtacgccgagtttgaagggcagcatcatgcgttcttaaccgctgctccggactctgatgctgcaaaatctgttatggaactcatcaaggaattcgtcaccgagaattcaaaatgaaaacagaagaatcaagacattattttgctacttgcattgcagatgttatcttgggatgttttaagaatcgttgtatttcaataagctcgggttgttatgatctctcgggatgttttaagaatcgttgtatttcaataaatcgggttgttatgaaagagatcggtgttgattttacaaaaaaa

SEQ ID NO: 409 - protein, 323 aa, Linum perenne
MSATETPPADGDFEDCFGILRVYKDGSTWRSTQPSFNIPINAPPSVTTKDTIFDLRNNLKLRIYKPTSSTNLLPIIVHFHGGGFCLGSIDEPICQNCCFRLASQLQAVVISPAYRLAPENRLPAAIDDGYAALKWLQAQAAEPDNWLSEVADFGKVFVVGESAGANIAHHLAVRVGAGSADLGPVKMKGYVLLYPLFGGVVRTKSEAEAPKDMPLNLDSIDWFFRHSVPVGETSDYPVVNPFGPESKDLAPVELDPMLVVAGGSDVLVDRIRHYVEKLKLMGKTIQYAEFEGQHHAFLTAAPDSDAAKSVMELIKEFVTENSK

SEQ ID NO: 410 - DNA, 1254 bp, Linum perenne
atccaatcaccggccatggaatcttcaccctccacagccgccgccgccgccgaggagcttccgagagagtatctgccgttcctccgcatctacaaggacggcaccgtcgagcgcctcgtcggcactaaaaccgtacctcccgatccaactccctccgttcagtccaaagacgtatcttactcggatgagctcagcctctattcacgaatctacatccctaaatcacagatccagagcagcaacagaagcaagagcgagaacgagaagaataagaagaagaagcttcctgtcttagtttacttccacggcggcgcgttcttagtcgaatcagccttctcccctacttaccacacctacctcaactcgattgtagcagcggcgaacgtgatcgccgtctccgtcgactaccgccgcgcaccagagcatcccctaccgattgcctacgacgattcctggacggctctcgagtggatcggatcacacagatccggatccggatctgagctctggctcaacgagtacgccgatttggactctgtatttctcgcgggggacagcgctggtgcgaacatagcacaccggatggcgattcggttcgggattgaaccgatcagaggaattggtttaaccggaatgatcctgattcatccgtatttctggggggaggatccgatcggggaagaagaggaagagatggaggatcgggaaggtgcgctggagttctggaagctggcgtgtccgacgacgagcggcggtgatgatccgtgggtgaatccggcggcggatgaagatctgtggaggttagggtgcgggaaagtggtggtggcggtggcagagaaggatttcttgaaggagagagggaagctttactgtgaggtgttgaaggagagtggttggaagggtgaggttgagatgttggaagctggaggtgaaggccatgttttccatttgatggactgtgagtgtgggaatgctgttgctatgagggagatgatcggttgcttcatccatggttagggtttcgagatttcgagattcgaggtttccgaagcgtgtgtgtggattctcgtggatgtttttcgtatggttatgacgaggtacggagaaaggaaggatgttgttgttacgtacgatgaaagactttggtagatgttaggttggtttgaaactatgtcgtggatgttttcgtctatctgcgactatgttgtaaacggaataaaataattttatttaatcttcttttgggtaaaaaaa

SEQ ID NO: 411 - protein, 333 aa, Linum perenne
MESSPSTAAAAAEELPREYLPFLRIYKDGTVERLVGTKTVPPDPTPSVQSKDVSYSDELSLYSRIYIPKSQIQSSNRSKSENEKNKKKKLPVLVYFHGGAFLVESAFSPTYHTYLNSIVAAANVIAVSVDYRRAPEHPLPIAYDDSWTALEWIGSHRSGSGSELWLNEYADLDSVFLAGDSAGANIAHRMAIRFGIEPIRGIGLTGMILIHPYFWGEDPIGEEEEEMEDREGALEFWKLACPTTSGGDDPWVNPAADEDLWRLGCGKVVVAVAEKDFLKERGKLYCEVLKESGWKGEVEMLEAGGEGHVFHLMDCECGNAVAMREMIGCFIHG

SEQ ID NO: 412 - DNA, 1279 bp, Linum perenne
aaactcatctctcccccaatcatccaatcaccggccatggaatcttcaccctccacagccgccgccgccgccgacgagcttccgagagagtatccgccgttcctccgcatctacaaagatggcaccgtcgagcgcctcgtcggcaccaaaaccgtccctcccgatccaactccctccgtgcagtccaaagacgtagcttactccgaagagctcagcctctactcacgaatctacatcccgaaatcacagatccagagcagcaacagcagtaagattgagaacgagaagaataagaagaagaagaagcttccggtcttagtttacttccacggcggcgcgttcctagtggaatcagccttctcacctacctaccacacctatctcaactcgattgtagcagcggcgaacgtgatcgccgtctccgtcgactaccgccgcgcaccagagcatcccttaccgatcgcctacgacgattcctggacagctctagagtggatcggatcacacagatccggatccggatctgagctctggctcaacgagtacgccgatttggactctgtatttctcgcgggggacagcgcgggtgcgaacatagcacaccggatggcgattcggttcgggattgaaccgatcagaggaattggtttaaccggattgatcctgattcatccgtatttctggggggaggatccgatcggggaagaagaggaagagatggaggatcgggaaggtgcgctggagttctggaagctggcgtgtccaacgacgagcggcggcgatgatccgtgggtgaatccggcggcggatgaagatctgtggaggttagggtgcgggaaagtggtggtggcggtggcggagaaggatttcttgaaggagagagggaagctttactgtgaggtgttgaaggagagtggttggaagggtgaagttgagatgttggaagctgaaggtgaaggccatgttttccatttgatggattgtgagtgtgggaatgctgttgctatgagggagatgatctgttgcttcatccatggttagggtttcgagatttcgagattcgaggtttccgaagcgtgtgtgtggattctcgtggatgtttttcgtatggttatgacgaggtacggagaaaggaaggatgttgttgttacgtacgatgaaagactttggtagatgttaggttggtttgaaactatgtcgtggatgttttcgtctatctgcgactatgttgtaaacggaataaaataattttatttaatcaaaaaaaaaaaaaaaaaaa

SEQ ID NO: 413 - protein, 334 aa, Linum perenne
MESSPSTAAAAADELPREYPPFLRIYKDGTVERLVGTKTVPPDPTPSVQSKDVAYSEELSLYSRIYIPKSQIQSSNSSKIENEKNKKKKKLPVLVYFHGGAFLVESAFSPTYHTYLNSIVAAANVIAVSVDYRRAPEHPLPIAYDDSWTALEWIGSHRSGSGSELWLNEYADLDSVFLAGDSAGANIAHRMAIRFGIEPIRGIGLTGLILIHPYFWGEDPIGEEEEEMEDREGALEFWKLACPTTSGGDDPWVNPAADEDLWRLGCGKVVVAVAEKDFLKERGKLYCEVLKESGWKGEVEMLEAEGEGHVFHLMDCECGNAVAMREMICCFIHG

SEQ ID NO: 414 - DNA, 1287 bp, Linum perenne
gcaaagcagtaatgcgtctcctcgtctcttctccaccgtccattcctttcctcttcaacctccaccaccgccgtccaacttctccggccaccaccgtcctcactccccaccgccgccgccgctcctcctccttccgctgctctctctcaatggacaccaccgcgccacctcacgacgagatcgcccacgactacccacctttcctccggatctacaagaccggccgtgtcgaacgcctcctcggcaccgacgtcgtcccggcgactctcgacccggacaccaacgtccgatcaaaggacgtcgtgttctcccctgaccaaaacctaacttccaggatctacatccctgagggactagatctgaatcagaagctcccgctcattgtctacttccacggcggcggattctgtatcgagactccctttactcacaagtaccaccgatccgtcaatttgcttgcctctcaggtgaaggcgatcgccgtctcggtggattacaggctagctccagagcatccgttgccgatcggatacgacgactcctggtcttgcctcgaatggatcgcgtctcactcgaacggagctgggccggaaccgtggctgaactcgcacgccgatttcagccgcgtgtatttcgccggagatagcgccggagcgaacatagcgcaccagatggccatccgaaacattgctggcaaggtgttcgacgaaatgtctgtggggatcgtgttgatacatccgtacttttgggggaaggttccgatcggcggggagccagcggagccggagaagaggaggacggtggaagggatatggtactttgcttgtccgacgacgagcggttgcgacgacccgtatataaacccggtaatcgacccgaatctggagaagctcggatgtgggaaggtgctggtgatagtggcggagaaggatgtgctgaaggagagagggaagagttactacgatgaattgaagaagaagactggttgggctggcgaaatcgagcttttcgaggttgaggaagaagatcatgttttccatttgcagaagagtgattgtgagaatgctgttttgatgaacaggaagattgttgagttcatcaatggcggtgaatgaaagaaatcaaaataattgttttttagagaccggttttggttcgggttacgaattgattctaaaattttaaaatattgtaaattgaccccgaaactttaaattttgttacgatacaatactatagtcgccagtatatttcggctattttgctaaaaaaaaaaaaaaaaaaaaa

SEQ ID NO: 415 - protein, 367 aa, Linum perenne
MRLLVSSPPSIPFLFNLHHRRPTSPATTVLTPHRRRRSSSFRCSLSMDTTAPPHDEIAHDYPPFLRIYKTGRVERLLGTDVVPATLDPDTNVRSKDVVFSPDQNLTSRIYIPEGLDLNQKLPLIVYFHGGGFCIETPFTHKYHRSVNLLASQVKAIAVSVDYRLAPEHPLPIGYDDSWSCLEWIASHSNGAGPEPWLNSHADFSRVYFAGDSAGANIAHQMAIRNIAGKVFDEMSVGIVLIHPYFWGKVPIGGEPAEPEKRRTVEGIWYFACPTTSGCDDPYINPVIDPNLEKLGCGKVLVIVAEKDVLKERGKSYYDELKKKTGWAGEIELFEVEEEDHVFHLQKSDCENAVLMNRKIVEFINGGE

SEQ ID NO: 416 - DNA, 1084 bp, Linum perenne
tacttcactgaaacactccaacctcaaatctttcccaaccatggccaattcctcatcaaccgacctcgagatcgcagtcgatctagctccgatggtccgcgtgtacaaaaacggcgtcgtggagcgcttcatgggcaccgagacagtcccggcctcactatccgacccgaaaactacagtccaatccaaggacgtcccatactcccttgacccgggcctggacctccaggccaggctctacctgcctaagcaggtagaaccgggtcagaagctcccgctcttggtctactaccatggcggcggtttcgtcatcgaaaccgccttctccccgacgtaccacaaccaccttaacatcttggtcgccgaggccaacgttatcgccgtctccgttgactaccgccgggcgccggaatgtcccattccgataccgtacgaggattgttgggccgcgcttaaatgggctggatcacatgctggtggatcaggcccagaagagtggctcaatgagcacgcggatttcgggtccgtgtttctcgcgggtgattctgccggggcgaatatagtccaccacgtggctatgaggtttgggcaggaggagatcgaagggatcccgcaacttggaggattggttatgattcacccgtatttcgctggaaacgaaccggtgggaaacgaaccggtttcgagggctagtaggggagaaatgttgtggaagctgctggctcatccaagttcaacgagtggacttgacgacccgtacatcaacccggcattcgacccgaaactggccgggttgggctgctcaaaggtcttggttatggttgcggagaaggattttctgagggatcgagggcactattactatgagttgctcaaaggaagtggatggaaaggtgacgttgagatcgttgaaactaacggcgaggatcatgtttttcatttgaaggataacgattgtgctaacgccgttaatttgaggaagaagatatgttccttcatcaataattaaaataatgtattatggagcttgctattatttgcaacttttacttatttatgaattattaaaaaaatatctcaaaaa

SEQ ID NO: 417 - protein, 322 aa, Linum perenne
MANSSSTDLEIAVDLAPMVRVYKNGVVERFMGTETVPASLSDPKTTVQSKDVPYSLDPGLDLQARLYLPKQVEPGQKLPLLVYYHGGGFVIETAFSPTYHNHLNILVAEANVIAVSVDYRRAPECPIPIPYEDCWAALKWAGSHAGGSGPEEWLNEHADFGSVFLAGDSAGANIVHHVAMRFGQEEIEGIPQLGGLVMIHPYFAGNEPVGNEPVSRASRGEMLWKLLAHPSSTSGLDDPYINPAFDPKLAGLGCSKVLVMVAEKDFLRDRGHYYYELLKGSGWKGDVEIVETNGEDHVFHLKDNDCANAVNLRKKICSFINN

SEQ ID NO: 418 - DNA, 1335 bp, Linum perenne
  misc_feature (5)..(5): n is a, c, g, or t
tactncactaaaaacagccaaataccaattcaccaatcatgtccgacgaagaaatctccctcgacctctctcctctaatccgcatccacaaaaacggcaccgtcgagcgattgatgacctacaccactgtccctgccggacacgaccaccaatacgacgtcgtctccaaggacgtcatcttctccaccgatcccaatctctctgcccgcatttacgccccttccgccacagtcaccaccggcgggaggaaaaacctcccgatcctcgtctactaccacggcggcgggttttgcatcgagtcagccttctctcagtcctaccacggctacgtcaacggcctagtcgccgccgcacaaatcgttgtcgtctctgttgactaccgcctggcccctgaacaccccctcccttgcgcttatgacgattcgtgggcggcactcaaatggatcatctccggggccgaagattggttgaacgaattcgtcgatttcgggaagatctacttggccggagacagcgccggcgcgaacatcgctcaccacgtcgcaatgaggaacggggaggagaagttgatagatctggtagggattgtgcttgtggatccgtatttttgggggacggatccgattggggatgagccgaaggatgaagagagtcggcgggtgccgggcgggttgtggttgatggcgaatccgggttcggtggccaggttggatgacccgaaaattaatgtcaccgttgacccgaagctgccgagtttgggttgccggcgggtgctggttttggtggcggagaaggatatgttgaaggatagagggtggagatattatgagactatggggaagaatggatggaaagggacggcggagattgaagagacgaagggcgaagggcatgttttccatttgtataacctggcgtcggagagtgcggcggcaaggatgaaacgcaccgttttgttcttgaatcaagaaaggaattaggaaattactaattagtggcttagtggcttctttactattgcaattttcttttgtctttgttttctggcgggggtgattagatatgataataaataaattgctggtgctggtcagtcttaaataatgaaaatgactttgaagatagtatcctggaagctacagagatatactacatccacaaggtttcaaactggactcagggctcttgggcaaagtacattctaaaggtcccttttatgtctacttggttgcttctcttttctgtaattagccattccaggctgagatttgctgtaaattcaaatattgcaggctgagatttgcttaaagactgaaagagagagagagtttcaca

SEQ ID NO: 419 - protein, 313 aa, Linum perenne
MSDEEISLDLSPLIRIHKNGTVERLMTYTTVPAGHDHQYDVVSKDVIFSTDPNLSARIYAPSATVTTGGRKNLPILVYYHGGGFCIESAFSQSYHGYVNGLVAAAQIVVVSVDYRLAPEHPLPCAYDDSWAALKWIISGAEDWLNEFVDFGKIYLAGDSAGANIAHHVAMRNGEEKLIDLVGIVLVDPYFWGTDPIGDEPKDEESRRVPGGLWLMANPGSVARLDDPKINVTVDPKLPSLGCRRVLVLVAEKDMLKDRGWRYYETMGKNGWKGTAEIEETKGEGHVFHLYNLASESAAARMKRTVLFLNQERN

SEQ ID NO: 420 - DNA, 1056 bp, Linum perenne
tacttcactaaaatcttcaattcattcttccaaaaaatggctccttccgacgagatcgaacgcgacttcccaggcttcttcaaagtctacaaggacggccgcgtccagcgctactgggacaccggcgaccacgtccccgccggcctcgactccgaaaccggcgtcgaaaccaaggacgtcgtcatctcccaacaaaccggcgtcaaggcccggatcttcctccctaaactctccggcgaagccaagctccccgtaatcctccacttccacggcggcgggttctgcatcggatcaccgttctctcctccgctcaagatctacctctcagccctcgccacacagacgaactccatcacgatctcgatcgattaccgtctagcgccggagcacaagctcccgatcgcgttcgacgactgctgggacgggctcaagtgggtcgcgctccacgccggcgggtcaggacctgaaccgtggatgaaccggtacgcggatctgggtcggatcgtgctgggcggggagagcgcgggtgccacgctggcgcattacgtggcggtccaggctggcgcgaggggtgttgacggtaaggatggggtgaggctgagtcggatggttttggttcatccgtacttcgggtcggagcaacccgacgggttgatacagtacatgtggccgacgacttcgggtacgaaggatgacccgatgctgcacccggcgcgtgacccggacgtggggaagatgagactggggaaggttttggtttgcgtggcggagaaggatccgttgaaggggagaggggatagttacgtggcggcgatgagagagaagaagagcggcggcgcgtggggtgggagcgtggagtatttcgagacgaaaggggaggatcattgttttcatttttttaatcccaagagtgagaatattgggcccctcatgaagacgatttttgatttcgttaagcaggatggttgatttttggttattattcggtttggtggttttttccggttcgggttgaaagtaataatatgggttttcggtttaaaaaaaaaaaaaaaa

SEQ ID NO: 421 - protein, 310 aa, Linum perenne
MAPSDEIERDFPGFFKVYKDGRVQRYWDTGDHVPAGLDSETGVETKDVVISQQTGVKARIFLPKLSGEAKLPVILHFHGGGFCIGSPFSPPLKIYLSALATQTNSITISIDYRLAPEHKLPIAFDDCWDGLKWVALHAGGSGPEPWMNRYADLGRIVLGGESAGATLAHYVAVQAGARGVDGKDGVRLSRMVLVHPYFGSEQPDGLIQYMWPTTSGTKDDPMLHPARDPDVGKMRLGKVLVCVAEKDPLKGRGDSYVAAMREKKSGGAWGGSVEYFETKGEDHCFHFFNPKSENIGPLMKTIFDFVKQDG

SEQ ID NO: 422 - DNA, 2391 bp, Linum perenne
aacagccaaataccaattcaccaatcatgtccgacgaagaaatctccctcgacctctctcctctaatccgcatccacaaaaacggcacagtcgagcgattgatgacctacaccactgtccctgccggacacgaccccaaatacgacgtcgtctccaaggacgtcatcttctccaccgatcccaatctctccgcccgcatttacgccccttccgccacagtcaccaccggcgggaggaaaaacctcccgatcctcgtctactaccacggcggcgggttttgcatcgagtcagccttctctcagtcctaccacggctacgtcaacggcctagtcgccgccgcacaaatcgttgtcgtctctgttgactaccgcctcgcccctgaacaccccctcccttgcgcttatgacgattcgtgggcggcactcaaatggatcgtctccggggccgaagattggttgaacgaattcgtcgatttcgggaagatctacttggccggagacagcgccggcgcgaacatcgctcaccacgtcgcgatgaggaacggggaggagaagttgatagatctggtagggattgtgcttgtggatccgtatttttgggggacggatccgattggggatgagccgaaggatgaagagagtcggcgggtgccgggcgggttgtggttgatggcgaatccgggttcggtggccgggttggatgacccgaaaattaatgtcaccgttgacccgaagctgccgagtttgggttgccggcgggtgctggttttggtggcagagaaggatatgttgaaggatagagggtggagatattatgagactatggggaagaatggatggaaagggacggcggagattgaagagacgaagggcgaagggcatgttttccatttgtataacctggcgtcggagagtgcggcggcgaggatgaaacgcaccattttgttcttgaatcaagaaaggaattaggaaattacgtaattagtggcttagtggcttctttgctattgcaattttcttttgtctttgttttctggcgggggtgattagatatgataataaataaattgctggtgctggtgctggtcagtcttaaataatgaaaatgactttgaagatagtatgctggaagctacagaggtatactacatccacaaggtttcaaactggagtcagggctcttgggcagagtacattctaaaggctgagatttgcttaaagactgagagagagagtttcacaatatatgaacctaaacagtgtggaaaaagtaatagaggtaagtaagctcaacgtcaaacatcttaaaatattcttaaaatatactttggtgatctcaccaaactttttgccacataagctcaatctctaaccacaattttccaactcatcaactaattttatatcaaaattatatttatctatcatactaataaatgcactaacattaatgtgtttataagttatgaaatataaagtttaagactatataaatacactaacattaatgtgtttatgagttatgaaatatatccaaaccttaaccatactaacacaataacactcatatttgctatcaaatttattactatacatatttttatgtttaacaatatcataaatatgttttcacaattacaaacggtagatattagcaaaaaatttagaatgaaccatactttttattaggtaccactaaaatattgacatattgtgcctaagttcgtcattcattactataatgtatattatatttaaattagtcaataatttgttggtatgatatactattataataaataataaataatcattagttactcataataatttcaaaaatatgataaataaataatttgaaaattctccattcacaaatatacaattttcattaaaatttttcttgaattttactacaaaagaccaaataagaaaaatgtgcatcatgaatcttttgtactatattattaatatttttaattaattatatttgctttgtaatcacatgtagtgtacaaattagatgagaatattttggtcaatataccaagggtgagttaatatgcttagcaattggtacccgaaaaccaaatacccacctaaaattcggcaaatttggtcgggaattacccatttcccgagtaaagttgacgggtacgggggaacctgttacccagtttgagcgggtaacaagctgcggggacgatcattacgagatcaacggaggaagaaggttgtgtttgttaggagaagtgtaaatacggttgctcatgtgttagcacgataatcgttgttttcgtctgagactgtaataggatcatagtctccgaactggttaagtgaaactttgatagatgtttgtttgacgaggcattaataataatgaaaaaaa

SEQ ID NO: 423 - protein, 313 aa, Linum perenne
MSDEEISLDLSPLIRIHKNGTVERLMTYTTVPAGHDPKYDVVSKDVIFSTDPNLSARIYAPSATVTTGGRKNLPILVYYHGGGFCIESAFSQSYHGYVNGLVAAAQIVVVSVDYRLAPEHPLPCAYDDSWAALKWIVSGAEDWLNEFVDFGKIYLAGDSAGANIAHHVAMRNGEEKLIDLVGIVLVDPYFWGTDPIGDEPKDEESRRVPGGLWLMANPGSVAGLDDPKINVTVDPKLPSLGCRRVLVLVAEKDMLKDRGWRYYETMGKNGWKGTAEIEETKGEGHVFHLYNLASESAAARMKRTILFLNQERN

SEQ ID NO: 424 - DNA, 1133 bp, Linum perenne
gcaaaagcagtaatgcgtctcctcgtctcttctccaccgtccattcctttccccttcaacctccaccaccgccgtccaacttctccggccaccaccactctcactccccaccaccgccgccgctcctccttccgctgctctctctcaatggacaccaccgcgccacctcacgacgagatcgcccacgactactcccctttcctccggatctacaagaccggccgagtcgaacgcctcctcggcaccgacgtcgtcccggcgactctcgacccggacaccaacgtccgatcaaaggacgtcgtattctcccctgaccaaaacctcacttcccgtatctacatccctgagggactagatccgaatcagaagctcccgctcatcgtctacttccacggcggcggattctgcatcgagactccttttacccacaagtaccacagatccgtcaatttgttagcctctcaggtgaaggcgatcgccgtctcggtggattacaggctagctccagagcatccgttgccgatcggatacgacgactcctggtcttgcctcgaatggatcgcgtctcactcgaacggagcagggccggaaccgtggctgaactcgcacgccgatttcagccgcgtgtatttcgccggagatagcgccggagcgaacatagctcaccagatggccatccgaaacattgctggcaaggtgttcgacgaaatgtctgtggggatcgtgttgatacatccgtacttttgggggaaggatccgatcggcggggagccagcggagccggagaagaggaggacggtggaggggatatggtactttgcttgtccgacgactagcggttgcgacgacccgtatataaacccggtaatcgacccgaatctggagaagctcggatgtgggaaggtgctggtgatagtggcggagaaagatgtgctgaaggagagagggaagagttactacgatgaattgaagaagaagactggttggaatggcgaaatcgagcttttcgaggttgaggaagaagatcatgttttccatttgcagaagagtgattgtgagaatgctgttttgatgaacaggaagattgttgagttcatcaatggcggtgaatgaaagaaatcaaaataattgtt

SEQ ID NO: 425 - protein, 366 aa, Linum perenne
MRLLVSSPPSIPFPFNLHHRRPTSPATTTLTPHHRRRSSFRCSLSMDTTAPPHDEIAHDYSPFLRIYKTGRVERLLGTDVVPATLDPDTNVRSKDVVFSPDQNLTSRIYIPEGLDPNQKLPLIVYFHGGGFCIETPFTHKYHRSVNLLASQVKAIAVSVDYRLAPEHPLPIGYDDSWSCLEWIASHSNGAGPEPWLNSHADFSRVYFAGDSAGANIAHQMAIRNIAGKVFDEMSVGIVLIHPYFWGKDPIGGEPAEPEKRRTVEGIWYFACPTTSGCDDPYINPVIDPNLEKLGCGKVLVIVAEKDVLKERGKSYYDELKKKTGWNGEIELFEVEEEDHVFHLQKSDCENAVLMNRKIVEFINGGE

SEQ ID NO: 426 - DNA, 1560 bp, Linum perenne
aacagccaaataccaattcaccaatcatgtccgacgaagaaatctccctcgacctctctcctctaatccgcatccacaaaaacggcaccgtcgagcgattgatgacctacaccactgtccctgccggacacgaccaccaatacgacgtcgtctccaaggacgtcatcttctccaccgatcccaatctctctgcccgcatttacgccccttccgccacagtcaccaccggcgggaggaaaaacctcccgatcctcgtctactaccacggcggcgggttttgcatcgagtcagccttctctcagtcctaccacggctacgtcaacggcctagtcgccgccgcacaaatcgttgtcgtctctgttgactaccgcctggcccctgaacaccccctcccttgcgcttatgacgattcgtgggcggcactcaaatggatcatctccggggccgaagattggttgaacgaattcgtcgatttcgggaagatctacttggccggagacagcgccggcgcgaacatcgctcaccacgtcgcaatgaggaacggggaggagaagttgatagatctggtagggattgtgcttgtggatccgtatttttgggggacggatccgattggggatgagccgaaggatgaagagagtcggcgggtgccgggcgggttgtggttgatggcgaatccgggttcggtggccaggttggatgacccgaaaattaatgtcaccgttgacccgaagctgccgagtttgggttgccggcgggtgctggtttcggtggcggagaaggatatgttgaaggatagagggtggagatattatgagactatggggaagaatggatggaaagggacggcggagattgaagagacgaagggcgaagggcatgttttccatttgtataacctggcgtcggagagtgcggcggcaaggatgaaacgcaccgttttgttcttgaatcaagaaaggaattaggaaattactaattagtggcttagtggcttctttactattgcaattttcttttgtctttgttttctggcgggggtgattagatatgataataaataaattgctggtgctggtcagtcttaaataatgaaaatgactttgaagggccgacaagaagaagatcgaggacgccattgaaggtgccatccagtggttggacgccaaccagttggctgaatcagatgagttcgaggacaagatgaaggagctggagagcatctgcaacccgatcattgccaagatgtaccagggtgctggaggagaaggcggtgctccaatggatgatgatgaggtcccagctggcagcggcggtgctggtcccaagatcgaggaggtcgactaagtttgtggccgttagttttatcaagttttgggccactgttatcggatttatgttatttttgtttttacggattgggattttgggccactttttggacaagattttgtggcccttaagtatgttttaattaatttgtcttgagcggaattggtggcgggagcttttaactgcttcccgcctttatctaatgatttctggtttaagttttcaaaa

SEQ ID NO: 427 - protein, 313 aa, Linum perenne
MSDEEISLDLSPLIRIHKNGTVERLMTYTTVPAGHDHQYDVVSKDVIFSTDPNLSARIYAPSATVTTGGRKNLPILVYYHGGGFCIESAFSQSYHGYVNGLVAAAQIVVVSVDYRLAPEHPLPCAYDDSWAALKWIISGAEDWLNEFVDFGKIYLAGDSAGANIAHHVAMRNGEEKLIDLVGIVLVDPYFWGTDPIGDEPKDEESRRVPGGLWLMANPGSVARLDDPKINVTVDPKLPSLGCRRVLVSVAEKDMLKDRGWRYYETMGKNGWKGTAEIEETKGEGHVFHLYNLASESAAARMKRTVLFLNQERN

SEQ ID NO: 428 - DNA, 1208 bp, Linum perenne
atcgccttcaattcaatcatccaaaaatggctccttccgacgagatcgaacgcgacttcccaggcttcttcaaagtctacaaggacggccgcgtccagcgttactgggacaccggcgaccacgtccccgccggcctggactccgaaaccggcgtcgaaaccaaggacgtcgtcatctcccaacaaacaggcgtcaaggcccggatcttcctccctaaactctccggcgaagcgaagctccccgtaatcctccacttccacggcggcgggttctgcatcggatcaccgttctctcctccgttcaagatctacctctcagccctcgccacacagacgaactccatcacgatctcgatcgattaccgtctagcgccggagcacaagctcccgatcgcgttcgacgactgctgggacgggctcaagtgggtcgcgctccacgccggcgggtcgggacccgaaccgtggatgaaccggtacgcggatctgggtcggatcgtgttgggcggggagagcgcgggcgccacgctggcgcattacgtggcggtccaggctggcgcgagggaattggacggtaaggatggggtgaggctgagtcggatggttttggtgcatccgtacttcgggtcggagcaacccgacgggttgatactgtacacgtggccgacgacttcgggtacgaaggatgacccgatgctgcacccggcgcgtgacccggacgtgaggaagatgaagttggggaaggttttggtgtgcgtggcggagaaggatccgttgaaggggagaggggatagttacgtggcggcgatgagagagaagaagagcggcggcgcgtggggtgggagcgtggagtatttcgagacgaaaggggaggatcattgttttcatttttttaatcccaagagtgagaatattgggcccctcatgaagacgatttttgatttcgttaagcaggatggttgattttttggttattattcggtttcgtggttttttcggttcgggttgaaagtaataatatgggttttcggtttgggttgtaaagtgtacactagatatagtagttagtgcttaaacataagagaagagggtgagacataagagaagagggtgagacacagaagtattgaggcgtactatgatgtcttaagtgtgtgctgacgagtgatgtttgggaattggaattttctagcatattttacagaaaaaaaa

SEQ ID NO: 429 - protein, 310 aa, Linum perenne
MAPSDEIERDFPGFFKVYKDGRVQRYWDTGDHVPAGLDSETGVETKDVVISQQTGVKARIFLPKLSGEAKLPVILHFHGGGFCIGSPFSPPFKIYLSALATQTNSITISIDYRLAPEHKLPIAFDDCWDGLKWVALHAGGSGPEPWMNRYADLGRIVLGGESAGATLAHYVAVQAGARELDGKDGVRLSRMVLVHPYFGSEQPDGLILYTWPTTSGTKDDPMLHPARDPDVRKMKLGKVLVCVAEKDPLKGRGDSYVAAMREKKSGGAWGGSVEYFETKGEDHCFHFFNPKSENIGPLMKTIFDFVKQDG

SEQ ID NO: 430 - DNA, 1180 bp, Peperomia caperata
gcattcaaacatataaatatcatgcccaaccctgctacattttccaacgcccttcttcctccacatctgtaactagttgtatccatggaaggagaaggaagatcagacccaaatacagtagaggagattgatttgtacaagttattgaagatagtccgaaacccagatgggtcactcacaaggtttacagaccactctcttctctacacaaaccccaacccgatccgggcatccttcaaggacattacctacgacccggcccataatgtctggttacgcctctatcggcccagcaccgacccggaccggtccggttcaaaacttcctgtcctcgtttacttccacggtggagggttcataatttgcagcgtggacacgccacccttccacagtgcgtgtgctgagcggtctgaagaaattccggccattgttgtgtcggtggagtatcggctggctccggagaataggcttccggcggcctacgacgactcgacccgagccatcgagtggattcgagatgagtggacgagcgaaccatggctgagtaacctggccgacccgaatcgggttttcataatggggtccagtgcaggtgggaacattgccttccacgttgcaatgcgggtctgtgagcttgacctgagcccggtccgggttgctggggtgatactgaaccaaccctttttcggcgggatggaacgaaccgaatcggacgtcgaaaacgggtcgggtggggttataccacttgcagtgaccgacaagttatggaaggatgtcctacccgaggggtcagaccgggaccatgtgtactgcaatccggagtcggggcagtggcagctgggtaggcttccgaggtgtatggtttgtgggtattttggtgacccagtggtggaccggcaaagggctctggctcggaggttgaaggcgagtggggtcgatgtggtcgagcggtttgttgatgggtctcatgggagtgactacattgaaccggagaaaggccatgaaatgctcgaggctactaagaaatttattttagagaccgagtgagtacaatgtaaaggaactacacaattatatgccacattagtgatcgcttgctataatttgtgatgttatgtgcaagtattatagcaacttactataatgaattacacatcgtgaaaaaaaaaaaaaaaaaaaa

SEQ ID NO: 431 - protein, 320 aa, Peperomia caperata; identical to SEQ ID NO: 61

SEQ ID NO: 432 - DNA, 1205 bp, Peperomia caperata
cttcttttctcctcctcctttcctcttttagaagttaagattcagaaattcatggaaagagatggaaaatcagactcacttgcatcggaagaaattgatccatacaagttcctcaacatagtacagaacccagatggaaccctcacaaagcccataactcaccctttgctctacaaaagccccaacccgattcgagctcccttcaaagatatcacctacaacccgaccagcaatgtccggctccgactctatcggccccatgatgacgtggacctatcgggtggaaggcttcctgtcctcgtctacatccacggtggaggctttgtcctctttagtgtctcaactttccacgtggcatgcggtgataggtcggacgagattccggccattgtggtgtcggtggagtatagactcgctccggaggataagcttccggcagcctatgatgatgcaatcaatgcgatcaagtgggtccgggatgagtgggccaatgagccatggctaacagatcttgcggaccccaatcgagtttttatcattgggtccagcgctggtgggaacatagccctacacgtggcattgtgggcccaaaatcatgacctcaacccaattcggatcattgggattataatgaaccagccgtttttcggtggggtggaacgaaccgaatcggaggtcaaaaatggggcgggtggttcactgccgttggtggtgactgacctaatgtgggagctggccctgcctgtaggagctactcgagatcatgagtactgcaatcttgagtcgggtcagtggtttataggaaggcttccaaggtgtatgatttgtggattttcaggtgacccggtattcgaccgacaaagggggttggtccggctcttgaaggcgagtggaaccgatgtggttgagcagtttgaagaaggagggtttcatggtatcgattatgttgatccaaagaaaggtgaggaattactcggatcaatcaagaaatttataagagaaactaaatgagaaaaaatttgtttgttgagctttggaagtgcgtgttgcattggttgtcacatgtagtaatgtatgatgtttcctttgtttcattttatttatgcctgaaaggatatatatggttcaatctatgtttaaaaaaaaatggatgaatgtacatgggcaatgtaatttctttcaaaaaaaaaaaaaaaaaaaaaaaa

SEQ ID NO: 433 - protein, 319 aa, Peperomia caperata
MERDGKSDSLASEEIDPYKFLNIVQNPDGTLTKPITHPLLYKSPNPIRAPFKDITYNPTSNVRLRLYRPHDDVDLSGGRLPVLVYIHGGGFVLFSVSTFHVACGDRSDEIPAIVVSVEYRLAPEDKLPAAYDDAINAIKWVRDEWANEPWLTDLADPNRVFIIGSSAGGNIALHVALWAQNHDLNPIRIIGIIMNQPFFGGVERTESEVKNGAGGSLPLVVTDLMWELALPVGATRDHEYCNLESGQWFIGRLPRCMICGFSGDPVFDRQRGLVRLLKASGTDVVEQFEEGGFHGIDYVDPKKGEELLGSIKKFIRETK

SEQ ID NO: 434 - DNA, 1285 bp, Peperomia caperata
atcaatggcgcctctcgctggtgcttctcgtccaatcctctgctttcttcgccataagctcgataccttcatcgcacttttcaccagcatcataactttcttgacgaacgccattttcactaagtggggcaacgaaggcccctcgtccctcgccgtcagcccagctctgccgtggaaggcaaagattcagatatctctcctctccgccgtcacagacgccgcatttcgaaaagacggcaccatcaaccgccgactcatcaacttcttcgatttccaagcgacaccaaactcaaagcccgtggacggcgtccggactgccgacttccccgtcgacccgtcgaagcccgtctgggtccgcgtcttctcccctgccgactctttcgccgttcagacactccccgtcatcgtcttcttccacggcggcgggttcgtcttcctgacggccgcctccaaagcctacgacgccgtctgccgccgcttctcccgcgagcttaacgccgtggtcgtctccgtcacctaccgcctggcgccggagcatcggtttccagctgcgtacgaggatggaatcgacgctctccggtggctcgacgccgaccccacctgcgccgggttcgcgccctctgccgaccccaagcgggtcttccttgccggggacagtgccggcgccaacatcgctcaccacgttgccattcgatcatcgtcggaagtagtccgatcattacgggcgatcggattgatttcgattcaaccattcttcggcggggaggggaggacagcggccgaggtccggctcaagggtgcgccgctggtgtctgtggagaggacggattttatgtggaaggcgtttctcccgcatgggtcggatagggaccaccccgcggcgaacgtgtgggggacgaagtcggaggtggcgtacccggcgacgatggtggtggtgggcgggatggacccgttgcaagatttgcagaggaggtacgccgtgtggttgaaggagctggggaaggaggtgaggctggtggagtacgagtccggctttcattcgttttatgcgttcccggagtcgccggagacggccctgctcatggccgagctcacggccttcatcaaccgtcgacgagattgagttataaaaataaattttattagctttacaattactataaacttatacagtgggcatagaacagttaaattataataaaaacccctcattgtaattttttttattaaaaaatattatttattgaagggtcattaggataaaaaaaaaaaaaaaaaaaaaaaa

SEQ ID NO: 435 - protein, 372 aa, Peperomia caperata
MAPLAGASRPILCFLRHKLDTFIALFTSIITFLTNAIFTKWGNEGPSSLAVSPALPWKAKIQISLLSAVTDAAFRKDGTINRRLINFFDFQATPNSKPVDGVRTADFPVDPSKPVWVRVFSPADSFAVQTLPVIVFFHGGGFVFLTAASKAYDAVCRRFSRELNAVVVSVTYRLAPEHRFPAAYEDGIDALRWLDADPTCAGFAPSADPKRVFLAGDSAGANIAHHVAIRSSSEVVRSLRAIGLISIQPFFGGEGRTAAEVRLKGAPLVSVERTDFMWKAFLPHGSDRDHPAANVWGTKSEVAYPATMVVVGGMDPLQDLQRRYAVWLKELGKEVRLVEYESGFHSFYAFPESPETALLMAELTAFINRRRD

SEQ ID NO: 436 - DNA, 1053 bp, Peperomia caperata
acacattctttcacaaaaaccgttcatcatgtctatcattgcagaatgccctggctttctccaagtcttctccgatggcattgtcaagcgcttctcgccggacatagcgaatccctcgccggaatttatcgaaggctgcaagtcaaaggatgtcacaattgatctctcaaagccaattactgctagactatttgttcctgatgtatcaaacgctacatcttcccttcctgtacttgttcattaccatggaggtggcttttgcatgggttccaccgcctggaagggctaccatgatttcctcactggtctctccgtcacttcgaagtgcattatcgtctccgccgactatcggctggcgccggaaaatcgacttcccactgcctatgacgactgcttcagcgtgctggagtggctgactcacaatgcggggaaagagccatggttggaacacgccgacttgtcgcgggttttccttgccggcgagagcgccggcgcgaacctttgccaccatgtggcactaaaagcagcccaatcagacctcgacaacaaaatttcgttgatgggtatcgtgacaattcaccccttctttggtagtgaaaagcgaatagcgagtgagctagccgctggagcagagggcgtgaagatgtgtgacatgttctggtggttaggtttgccggttggggcagacagggatttctacgcttgtaactttgagactgcatggccgccgggaacggagtggccggagaattttccggccgtgcttgtgtgtgttgcagagaaggatttgttgaaggacagaggtttgatgtatgaagaatttttgaagaagaaaggtgtgaaagaggtggagatgatgtcgtcggagggtgagcagcatgcgtttcatctcaatacaccactttcagaggcaaccaaagagcttcagaagaagatggctgagttcattgcaaggttcttataaccagttctattcttaacaacagttgctaaatgtatcgaaatatcataattatatgatcacaaatttcattttaaaaaaaaaaaaaaaaa

SEQ ID NO: 437 - protein, 311 aa, Peperomia caperata
MSIIAECPGFLQVFSDGIVKRFSPDIANPSPEFIEGCKSKDVTIDLSKPITARLFVPDVSNATSSLPVLVHYHGGGFCMGSTAWKGYHDFLTGLSVTSKCIIVSADYRLAPENRLPTAYDDCFSVLEWLTHNAGKEPWLEHADLSRVFLAGESAGANLCHHVALKAAQSDLDNKISLMGIVTIHPFFGSEKRIASELAAGAEGVKMCDMFWWLGLPVGADRDFYACNFETAWPPGTEWPENFPAVLVCVAEKDLLKDRGLMYEEFLKKKGVKEVEMMSSEGEQHAFHLNTPLSEATKELQKKMAEFIARFL

SEQ ID NO: 438 - DNA, 2482 bp, Peperomia caperata
attccgatttggtgtgcataggcggcggcgtccagggtcgcggaaatggggtacatagagcaagctcgagaaaaccatgtcaagaagaaggtggaagaagctcttcgtagtaaaatgaaacggaaggcgcttaaaaattgtgagcagttgacgtccaaatatgctgagtgtgctgcaggaaggaccatatcagttgtttggcaatgccggaagcaagtaaacgagttgaatgattgtcttcatcgatacacaaatgactctgtattggaagagatgaagaaagtctacatggctgaacaggaattgaaaggttctgcccaactttagtcttctcaaggcacggtgcagattctttgactcgtccaaaaacttttaagtgcgttcgatagacgaaataaggacctagttgaaagctgatcaaggtactagagcaacatgctagctaaatgagaagttacaatggtatcctttggtaagaacattaacggattgccatattgggattgaaaaaatcaaaaaagctatgacggatatatgacttactcttatttaagcaaaatttgcagtcgagaaataactcctatttcttaatctaataagcgtgtgagcatcattgttttctattcatatacacgtttgagtttttctcccaccgtattttctggtttccacgaactaaagatgatttttttagggcctctttgcagtcaaaagggcggggggtggggggagggttcaaagaaggtagacgctcaataataatgaaagctttggtgccgagaatgctgactttagagaacgagaacgtaatcaaagcacatgtaacggttcagaacagcatttttaaggcttcaatgcccattctttattcgtacttattgatgctccaggtaagtgaagcgtggcttcttgttggccatgtgggcaacagaagctcccttcttatacaattattctacacgttagtctggctgccattacacgttcatgtgccattagttaggaggtgggggagtgcacatcatcgttagtggaagcctaaccccacacagcaaccaattgcggttcaagttcaacgaccattgttaaacttgtgttcaaactcggtgtttttccaccctcttttcttaatttctaatacgtacgagatttctaattctataaagtgtcgaagcaagctctaaagaagttaattatgatacacagttagccacaacgaccaatttttttggcggagaatgggagctctacgtctgaataatcaaagcttggaaacaatacatattaagcatcaccagcatgaggcagttgtggttgatgaagtgaaggggatagtaaagctctacaaagatgggcatgtagagcgatatccaatcgtccgtcatgtagcatgccgatcaaaccttgacccaaatgttacatgcggagacgtagtcatcgactcttgcaatggagtatgggcaagaatttacgtgcccaaacacctgacagccaagctgcctgtactcatatattttcatggcggcgggttctgcgtcggctctgctgcttggatatgctaccacgaattcctcttgcgactcgctggagcagctggctgcgtcatcatgtccgtcaactacaggttggcgccggaaaatcgccttccagcggccttcgacgatggtgtctccgcagtgaagtgggtggggcaacactccggagaagagagctggtggagtgggatgtgcgatttctccaaggtttatgtcgccggcgacagcgccggtgggtgtctagctcacgacgtcatgttacggttgtcaagcagcaatgaagctattgattctccctatgctctgagcaagatttgtatcaaagggatgattctgattcaaccattcttcggtggggaggagaggacgtggtcggagaataacatgacacaaccacgtaactcggccctaactctcagcgccgcggacgcctactggcgactggctttgccgatgggaacaacgcgcgatcatccttggtgcaatccctggtcgacgacggcggcctcccagaggttggaaagtttgtgcttgccgcccatattagtatgcgtgtcggagttggatattttgaaagatagaaacattgaattctgctcggccatgaaaggggcagggaagaaggttaaacttgctattcaagttggtgtggggcatgcgtttcagatacttcataacagttctactgctcgagctcgaacggaggagattattttagaaatcaattccttcgttaacacagagtataatgatcaatgatttacatattcaactagtccaaaaagaactacatgtttaactatattttgtttaaccaatcatttgtatcttgttattgtgaatcaagtaaacattgccgcccttttttattagaagaatgttgcaacaacaaaaaatgttgacgataaagaagtttttaaatcagcaaaaaaaaaaaaaaaaaaaaa

SEQ ID NO: 439 - protein, 351 aa, Peperomia caperata
MGALRLNNQSLETIHIKHHQHEAVVVDEVKGIVKLYKDGHVERYPIVRHVACRSNLDPNVTCGDVVIDSCNGVWARIYVPKHLTAKLPVLIYFHGGGFCVGSAAWICYHEFLLRLAGAAGCVIMSVNYRLAPENRLPAAFDDGVSAVKWVGQHSGEESWWSGMCDFSKVYVAGDSAGGCLAHDVMLRLSSSNEAIDSPYALSKICIKGMILIQPFFGGEERTWSENNMTQPRNSALTLSAADAYWRLALPMGTTRDHPWCNPWSTTAASQRLESLCLPPILVCVSELDILKDRNIEFCSAMKGAGKKVKLAIQVGVGHAFQILHNSSTARARTEEIILEINSFVNTEYNDQ

SEQ ID NO: 440 - DNA, 1315 bp, Peperomia caperata
attttaggatacacagttagccacaacgaccaatttttttggaggagaatgggagctctacgtctgaataatcaaagcttggaaacaatacacattaagcatcaccagcatgaggcagttgtggttgatgaagtgaaggggatagtaaagctctacaaagatgggcatgtagagcgatatccaatcgtccgtcatgtagcatgccgatcaaaccttgacccaaatgttacgtgcggagacgtagtcatcgactcttgcaatggcgtatgggcaagaatttacgtgcccaaacacctgacagccaagctgcctgtactcatatattttcatggcggcgggttctgcgtcggctctgctgcttggatatgctaccacgaattcctcttgcgactcgctggagcagctggctgcgtcatcatgtccgtcaactacaggttggcgccggaaaatcgccttccggcggccttcgacgatggtgtcgccgcagtgaagtgggtggggcaacactccggagaagagagctggtggggtgggatgtgcgatttctccaaggtttatgtcgccggcgacagcgccggtgggtgtctagctcacaacgtcatgttacggttgtcaagcagcaatgaagctattgattctccctatgctctgagcaagatttgtatcaaagggatgattctgattcaaccattcttcggtggggaggagaggacgtggtcggagaataacatgacacaaccacgtaactcggccctaactctcagcgccgcggacgcctactggcgactggctttgccgatgggaacaacgcgcgatcatccttggtgcaatccctggtcgacgacggcggcctcccagaggttggaaaatttgtgcttgccgcccatattagtatgcgtgtcggagttggatattttgaaagatagaaacattgaattctgctcggccatgaaaggggcagggaagaaggttaaacttgctattcaagttggtgtggggcatgcgtttcagatacttcataacagttctactgctcgggctcgaacggaggagattattttagaaatcaattccttcgttaacacagagtatgatcaatgatttacatattcaactagtccaaaaagaactacatgtttaactatattttgtttaaccaatcatttgtatcttgttattgtgaatcaagtaaacattgccgcccttttttattagaagaatattgcaacaacaaaaaatgttgacgataaagaatttttttaaatcagcaattctttgccttgaattagctctaaaaaaaaaaaaaaaaaaaaaa

SEQ ID NO: 441 - protein, 350 aa, Peperomia caperata
MGALRLNNQSLETIHIKHHQHEAVVVDEVKGIVKLYKDGHVERYPIVRHVACRSNLDPNVTCGDVVIDSCNGVWARIYVPKHLTAKLPVLIYFHGGGFCVGSAAWICYHEFLLRLAGAAGCVIMSVNYRLAPENRLPAAFDDGVAAVKWVGQHSGEESWWGGMCDFSKVYVAGDSAGGCLAHNVMLRLSSSNEAIDSPYALSKICIKGMILIQPFFGGEERTWSENNMTQPRNSALTLSAADAYWRLALPMGTTRDHPWCNPWSTTAASQRLENLCLPPILVCVSELDILKDRNIEFCSAMKGAGKKVKLAIQVGVGHAFQILHNSSTARARTEEIILEINSFVNTEYDQ

SEQ ID NO: 442 - DNA, 1280 bp, Peperomia caperata
atcaaaataaacttgccatccaattcactagactcgtctaatttgtgatttactaaaaacccaccaccatggtgctcgaggagaagagggccttgaagaacatctccgggtggctcaccgtgtacagcgacggttccgtcgaccggagttggacagggccgccggagttcaagttcatggccgacccagtacctccctctgtggagtatgtcgatggcgtcgccaccagagacattgtcatcgactctacctcaggcttggccgttcgggtttatcttccggaagaaaagatcgaaaaaaagaaggaactattgccggttatggttcactttcccggcggtggcctctgcatcagtgaagccaattggtatatgtaccatgcattttactcccgcgttgtcaaagccgccggcgccgcctgcgtctccgtctatctccgccgggccccggagcaccgcctccctgccgcaatcgacgacggcctcgacgtcctccactggctccgctccctcgccaggggcgaacccaactccagcgacgactcgcgctggctcgccgtccgcgtcgatttcacccgagtcttcctcgtcggcgactcctccggcggaagcctcgtccatctcgtcgcagccgaagcgggtaacgagccagactggtccccgctccgcctcgccggcggcgtgtcaatccacccggggttcgtccggtcaacccgcagccggtcggagctggagttgccggagtcaccgttcttgacgctggccatgctggacgggttcttgggcttagctctgccggagggagccaccaaggaccacccgtacacctgcccaatggggccagcggcgccgccgtttgagagtctgaagctgccgccaatgatggtggtggtggcagagaatgacttggtaaaggacactgagatggagtacgtggagacgatgaaagcggccgggaaggaagtggagctggtggtgaacgcaggagttgggcattcgttttacttgaacacgcttgccgtcgccggcgatcctcacacggcggcggagacgacggcgctcatcggcgccatatccggattcattgaaaggcatggcaaaatataaagtattagttttttaaacaaaattaaaataccttttaatgtaataaaaaaaaatgaagtaaatgtcgtttttttaacacaaaaataataataatgtgtgattgggtgtggttgtgtgtatcaatattcaatgaaatgtaaacaaatgtttgatctaaaaaaaaaaaaaaaaaaa

SEQ ID NO: 443 - protein, 345 aa, Peperomia caperata
MVLEEKRALKNISGWLTVYSDGSVDRSWTGPPEFKFMADPVPPSVEYVDGVATRDIVIDSTSGLAVRVYLPEEKIEKKKELLPVMVHFPGGGLCISEANWYMYHAFYSRVVKAAGAACVSVYLRRAPEHRLPAAIDDGLDVLHWLRSLARGEPNSSDDSRWLAVRVDFTRVFLVGDSSGGSLVHLVAAEAGNEPDWSPLRLAGGVSIHPGFVRSTRSRSELELPESPFLTLAMLDGFLGLALPEGATKDHPYTCPMGPAAPPFESLKLPPMMVVVAENDLVKDTEMEYVETMKAAGKEVELVVNAGVGHSFYLNTLAVAGDPHTAAETTALIGAISGFIERHGKI

SEQ ID NO: 444 - DNA, 1549 bp, Peperomia caperata
atcatatattgaattaagtagctggttgagatattaactagtaagggagatggctgctatttcagtgagtgattcacggtgctgggttcggggacaaaacaatgttaatggcgtggtggaagagattgaagggttgatcagagtgtacaaggatggcaaggttgaaaggcttccgattatgctcgttgtggattctgggttcatccccgattctaatgtagcctcttgggacgctaccattgacgccggccttggcgtatgggcgaggttctatctgcccaagagccaaaggaagctgcccctcctcatctacttccatggaggtgggttctgtgttggttcccctgcatggaaatgctaccacgaattcttgtccaagctcgcctccaccgccgaatgcatgattatgtcagtgaactaccgcctagccccggagcaccgccttcccgcggcctttgaagacggcgccatggccgtcaagtgggtgagggagcagtccacaagctggtggtgggcgtggtgcagcttctccaatgtgttcatcggaggagatagctccggggcttctctggcctacaatgtggcgattggaatctcttcatcggttctgactcctctctgcttgaaagggttgattcttatccaacctttctttggaggagaagctagaaccaaatcagagagggccgtagaacaatcacccagctccattctcactctgaaaacctctgattgctattggaggatgtccctcccaatcggttccaatagagaccatccctggtgcaatcctctgtataagagttcctggagtaaaaagttggagagcttgagtctacctccttcccttgtctgcgttgcagagaatgatatattgaaggacaggaacttggatttttgtttttccatgaggaaagctgggaagagagttgaacattttgtgtacaagggcatgggacatgcattccacatcctcaacaattctccatcttcaacagctcagacttgcgacatgatttctcacatcaaatccttcatgaaccgataatttaatgcatatatataccgacatgtaatattattaatcacttcagtgaaataatgtctgaaaagtcccaatatgagtttttagtagagaagtgttaagtgcgtgcaaggtccacgatcgtcataccggcatctttaatcatcaagatttaatcatgcatggtgtaatgatcgatcaaagtattgggtgcttgaggtggtataattgtaggacgttcactgtggcggacaagaaacatcttctatcatggtttggtttggtggagggagacataggcgagactcgtcgacaccattggagcgtgcacaataatgttaaagttattttgtcatatcgcgacatgtaatgtaatttcagtggggataaatattgttgagcatcaatcattcatgaccgtctaactgcaggcagcaagaacaacatatacagccaaagtcgtagctttttcatactaataatgaaactactcattatattgaaaaaaaaaaaaaaaaaaaaaaa

SEQ ID NO: 445 - protein, 332 aa, Peperomia caperata
MAAISVSDSRCWVRGQNNVNGVVEEIEGLIRVYKDGKVERLPIMLVVDSGFIPDSNVASWDATIDAGLGVWARFYLPKSQRKLPLLIYFHGGGFCVGSPAWKCYHEFLSKLASTAECMIMSVNYRLAPEHRLPAAFEDGAMAVKWVREQSTSWWWAWCSFSNVFIGGDSSGASLAYNVAIGISSSVLTPLCLKGLILIQPFFGGEARTKSERAVEQSPSSILTLKTSDCYWRMSLPIGSNRDHPWCNPLYKSSWSKKLESLSLPPSLVCVAENDILKDRNLDFCFSMRKAGKRVEHFVYKGMGHAFHILNNSPSSTAQTCDMISHIKSFMNR

SEQ ID NO: 446 - DNA, 1244 bp, Peperomia caperata
aaaaacaaaaaaaaatcactccaacatcaatcatggccgttgacggtgccggcgacgatgaacttctctacgaccaccctcccttcgcccgcgtctacaagtccggccgcgtcgagcgcctgatgggcaccgatactgtacccgccggccacgactctatctccggcgttacttccgtcgacgtcgccatctcccccgacgtatcagcccgtctctttctgccccttgtcgccgctaccggcaacgacggcagcaagaagaagctgccggtccttgtctactatcatggtggcggttttatagtcgagtcggcgagctctcccacttacgtcaactttctcaacgccctctgctcggcagccggcgtactagcagtgtctgtcgactaccgccgcgcacccgagcatcccctccccgctgcttacgacgactgcctcgccgcacttcactggtcgctctcccccacctcccaccactggctcgccgaccacgccgacctcactaccgtcctcctcgccggcgacagcgccggcgccaacatcgtccacaacatcctcctccgcggtggggccgaacttctccctccgatatccgccgcaatgctgatccacccgtacttctgggggactaccgcggtggggccgtggagcgccgacgaggacctgcggcggttgatagagaagctgtggcggctgatttgcccggcgaccagcggggtggacgacccgtggttgaacccgctggccgacgcggcggcggtggagaagattcggtgccggagagtgctggtgtgtgtggcggagaaggacttcttgatggagtggggctgggcttactacaatgcgctgtcatcgtcgacgtcggcggcgagtcatcatgggtttgaggtgccgacggtggagatggtggaaacgaaaggggaaggacatgttttccatctcataaagccggagtccggcgaggccaaggagttcattcgccggctcgccgtcttcatcaactccggcgacgagctgattattgattaattagtgcccctaagtgaggttttcagtaactatgaatgattatcatagttatgttatgcatgtcatatgatcatgaatagccatgctcgtactcatcattataatcataactaggttctacccgccggcataattaaaaacataataatttttgttattgatctatgttaaaataaagtttgtcaactttttttaaaaaaaaaaaaaaaaaaaaaa

SEQ ID NO: 447 - protein, 331 aa, Peperomia caperata
MAVDGAGDDELLYDHPPFARVYKSGRVERLMGTDTVPAGHDSISGVTSVDVAISPDVSARLFLPLVAATGNDGSKKKLPVLVYYHGGGFIVESASSPTYVNFLNALCSAAGVLAVSVDYRRAPEHPLPAAYDDCLAALHWSLSPTSHHWLADHADLTTVLLAGDSAGANIVHNILLRGGAELLPPISAAMLIHPYFWGTTAVGPWSADEDLRRLIEKLWRLICPATSGVDDPWLNPLADAAAVEKIRCRRVLVCVAEKDFLMEWGWAYYNALSSSTSAASHHGFEVPTVEMVETKGEGHVFHLIKPESGEAKEFIRRLAVFINSGDELIID

SEQ ID NO: 448 - DNA, 1277 bp, Sesbania bispinosa
aaaacaaacacttgccttcactcttctccacttcaattcttatcttctttcaccaaacaaaaatatctactatcactaccatccatcatcatgacctcaaccactgcaccactccttccatggaaggttcgcttcaccatgtctaccatctcttctctcatctcagtctctcaccgttccaatgacaccgtcaaccgccgtctcttcaacttctttgatcgaaaaacccctcctaaccctaactccatcgatggagtctcttcctctgacgtcatcgtagaccccacacgcgatctctggtttcgccttttcatcccctcctcaaactccatctccgacggacctctccccgtctttgtgtttttccacggcggcggttttgcattgttttctccgtcttccatctcatacaatgctgtttgtcgattattctgtcattcgtttcccgccatcattgtttctgttaattaccgtcttgcccctgagcatcgttatccttctcaatacgaagatggtttggaaatccttaaattcctcgatcaaaataacaacgttttaggaaaatctgctgatatcagcaaatgttttttgtcgggtgatagcgcgggtggtaatttggcccatcatgtagcagttcgagcttccttagaaaagtttcaagttttgaaaattattggtttggtttcaatccaaccgtttttcggaggtgaggaaagaaccgaatctgagatccgattcaaccgagttcctattgtttcaatggataaaactgattggtattggaagatgtttttgccagatggatcaacccgtgatcatgaagcggttaatgtttctggacctaatgcaatggatatttcgaatgtggattatccgaatacccttttgtgtgttggtggattggatccattattggattggcaaaagagatattacgaatggttgataaaatccggaaaagaagtggaattaattgaatatccaaatatgattcatgtgtttttttattttccagaattaccagagacgtcacagtttatttctagagttaaggatttcatgaataggcaaatggctaatgtgagttaagggtttacataaattgtatactggtttgtctatatatattgtatgaaagctagagaaaataggattatatgtaatatgtatagatacaattttcttctgtaagttttgtctttcgctgtcgatgtgagaatctcgatcgataatatgtaagtttcacgtgttgacactctaaaaaaaaaaaaaaaaaa

SEQ ID NO: 449 - protein, 332 aa, Sesbania bispinosa
MTSTTAPLLPWKVRFTMSTISSLISVSHRSNDTVNRRLFNFFDRKTPPNPNSIDGVSSSDVIVDPTRDLWFRLFIPSSNSISDGPLPVFVFFHGGGFALFSPSSISYNAVCRLFCHSFPAIIVSVNYRLAPEHRYPSQYEDGLEILKFLDQNNNVLGKSADISKCFLSGDSAGGNLAHHVAVRASLEKFQVLKIIGLVSIQPFFGGEERTESEIRFNRVPIVSMDKTDWYWKMFLPDGSTRDHEAVNVSGPNAMDISNVDYPNTLLCVGGLDPLLDWQKRYYEWLIKSGKEVELIEYPNMIHVFFYFPELPETSQFISRVKDFMNRQMANVS

SEQ ID NO: 450 - DNA, 1613 bp, Sesbania bispinosa
atccgagcaaatagttgctcccttctaaatttctgtatgcatctcttgtctcatctgcaggctgcagcaaacaaagcataaaaacacaaacattccttgctcttcttcacctcgcttctcagcttctgcagttccgtgtttcagtgtccgatctcactgagttaactcaactcaacaccaacaactaccatgactgttgcaactacaaccaccaaacagaaccttccatggaaggttcgcttcttcacctccctcctctctgcagtaatcgatgcctctcgccgctctaacgacaccattaaccgccgtctcctcaacttcctcgaccgccaggtcagcccaaactccgctaaaggcgtctcatcctctgacgtctctgtagacccaactcgcaacctctggttccgcctcttcgtcccttcctccgccgcctccgctgcagccgcatcccttcccgtcatcatatacttccacggcggaggcttcgggctcatgtcgccagcttccatcccctacgacgccgtttgccgtatgttctgccgttccttgtccgccattgttgtctctgttaactaccgtcttgcccctgagcaccgttttccttcgcaatacgacgacggttttgacgtcgttaagttcctcgaccaaaacggtgacgttctgcatgactccgctgacgtcacgaggtgttttttggcgggtgacagtgcgggcgggaacttggcacaccacgtggcggttaggttggcacgagagaaactccgtgtggtgaacgttattgggttgatttcgattcaaccgttttttgggggagaggaacgaaccgaatcggagatccgattgaagcgggtcccagtggtttcgatggatagaactgattggttttggaagatgtttttgccagaggggtcgaaccgggaccatgaagcggttaatgtgagtgggccgaatgcggaggatatttcggatgtggattacccgaatacgctcttgtgtgtgggtgggttggacccgttacaagattggcaaaggaagtattatgagtggttaaggaaatctgggaaggaggcacaactaatcgaatatccaaatatggttcatgttttttattacttttcggatttgccagagactggtcagtttctttctcaagtcagcgatttcatgacgaagcaaatggcgaatgtgaattaagggtttaaataatttggaaataatcatcattttaaactttgagtgttgttatattgcatctgctctgatgagggttcgctgatggataattggatatatagctttttcaatgtcttccgcagtcaagagtgaaaatgaacaccagaagtagaagatccttggttgcatggagtgatccgcaaaagcgcaaagaaacacgctcaaatcagtatataagccagtatgtattatgtaagcaagaagggtatgagttagggttaatgcatctatgtttgtcatcctaatattgtgaaacttttatggtgggtagtaggttaatgcatctttctccatttacggcaatcaattggtgaattgtaaagattctgctttgtgcaaaattattcggtgtttccattgtaaaaaaaaaaaaaaaaaaa

SEQ ID NO: 451 - protein, 334 aa, Sesbania bispinosa
MTVATTTTKQNLPWKVRFFTSLLSAVIDASRRSNDTINRRLLNFLDRQVSPNSAKGVSSSDVSVDPTRNLWFRLFVPSSAASAAAASLPVIIYFHGGGFGLMSPASIPYDAVCRMFCRSLSAIVVSVNYRLAPEHRFPSQYDDGFDVVKFLDQNGDVLHDSADVTRCFLAGDSAGGNLAHHVAVRLAREKLRVVNVIGLISIQPFFGGEERTESEIRLKRVPVVSMDRTDWFWKMFLPEGSNRDHEAVNVSGPNAEDISDVDYPNTLLCVGGLDPLQDWQRKYYEWLRKSGKEAQLIEYPNMVHVFYYFSDLPETGQFLSQVSDFMTKQMANVN

SEQ ID NO: 452 - DNA, 1800 bp, Sesbania bispinosa
  misc_feature (159)..(159): n is a, c, g, or t
cttttcttctgctcatattcattgcatccgagcaaatagtcgctcccttctaaattattgtatgcatctcttgtctcatctgcagcaaaaacaaagcataaaaacacaaacattccttacccttcttcacctcgcttctcagcttctgcaattccgtgnttcagtgtccgactcactgagttaattcaactcaacaccaacaactaccatgactgttgcaactacaaccaacaaacagaaccttccatggaaggttcgcttcttcacctccctcctctctgcattaatcgatgcctctcgccgctctaacgacacaatcaaccgccgtctactcagcttcctcgaccgcaaggtcagcccacactccgctaacggcgtctcatcctctgacgtctctgtggaccccacacgcaacctctggttccgcctcttcgtcccttcctccgccacctccgctgcagccgcagcccttcccgtcatcatatacttccacggcggaggcttcgggttcatgtcaccagcttccattccctacgacgccgtttgccgtatgttctgtagttccttgtccgccattgttgtctctgttaattaccgtcttgcccctgagcaccgttttccttcccaatacgacgacggttttgacgtccttaagttcctcgaccaaaacggtgccgttctgcgtgactctgctgacgtcacgaggtgttttttggcgggtgacagtgcgggcgggaacttggcacaccacgtggcggttaggtttgtacgagagaaactccgtgtggtgaacgttattgggttgatttcgatacaaccgttttttgggggagaggaacgaaccgaatcggagatccgattgaagcgagtcccagtggtttcgatggatagaactgattggttttggaagatgtttttgccagtggggtcgaaccgggaccatgaagcggttaatgtgtgtgggcccaatgcggtagatatttcggatgtggattacccgaatacgctgtgtgtgtgggtggattggacccgttacaagattggcaaaggaagtattatgagtggttaaggaaatctgggaaggaggcacaactaatcgaatatccaaatatggttcatgttttttattacttttcggatttgccagagactggtcagtttctttctcaagtcagcgacttcatgacgaagcaaatggccaatgtgaattaagggtttaaataattaggaaataatcattattttaaacttaagtgttgttatattgtatctgcgatctgatgagggttcgctgatggataattggatatataattttttcaatgtcttccgccgtcaagagtgaaaatgaacactagaagatccttgggagcatggagtgatacccgcaaaagcgcaaagaagcacccttaaatcagtatataagtcatcagtatgtattatgtaagcaagaagagtcatcaaataaatggaataatcgtgtacctggagttattgtcatcctaatattgtgaaactatattatatggtgggtagtaggttattgcattatttgcatctttctccatttaaagattggtgaattgtaaagattctgctttgtgtaaaatttattgaaaaatgttgtttgtacaacaacaacatttataacaaagagagatagagagaaagatagaaatgtgagatgtgataggtgatataatggagagagataaaaaaaaatgtgtgttgtatgagttgttgtatgatatatgttatataaatatgttatctcagaaaaaaaaaaaaaaaaaaaaaaaa

SEQ ID NO: 453 - protein, 286 aa, Sesbania bispinosa
MTVATTTNKQNLPWKVRFFTSLLSALIDASRRSNDTINRRLLSFLDRKVSPHSANGVSSSDVSVDPTRNLWFRLFVPSSATSAAAAALPVIIYFHGGGFGFMSPASIPYDAVCRMFCSSLSAIVVSVNYRLAPEHRFPSQYDDGFDVLKFLDQNGAVLRDSADVTRCFLAGDSAGGNLAHHVAVRFVREKLRVVNVIGLISIQPFFGGEERTESEIRLKRVPVVSMDRTDWFWKMFLPVGSNRDHEAVNVCGPNAVDISDVDYPNTLCVWVDWTRYKIGKGSIMSG

SEQ ID NO: 454 - DNA, 1302 bp, Sesbania bispinosa
acccaaacctttcatcattcatacaaaccctaaaacgcaatgtcgtctccaaacaaacccaaacccgttcttccttggaaaactcgcctctcaatttcactactaacggctttaacggacgcctcatgtcgatctgacggaaccattaaccgccgttttctcagcgtcctagatcgtaaagcttccgctaaagccactcctattaacggcgtttcaaccaaagacgttaccgttaactacgaacataacgtttggttccgtctctacacacccgccgtaactgtcaccggagatgaatctgaccccaaaaccgcctctctcccggtgataatcttctttcacggtggtggatttagctatctctcccctgcttcagtcgcatacgacgccgtttgccgtagattctgccgtaaaatctccgccgtagttgtctctatcaactaccgtcttacgccggagcatccttatccgtcgcaatacgatgacggagaatccgtgttaaaattcctcgacgagaacaaatctgtgttacctgaaaatgctgacgtgtcaaaatgtttcctcgctggggacagtgctggtgcaaacctagcacaccacgtggtggtccgggtctgcaaagcggggctccagagaatccggatcctcgggttgatttcaacccaaccgttcttcggtggagaggagcgaacggaagctgagattcacctcgagggatcgccgttggtgtcgatgaggaggaccgattggctgtggaaggtgtttttgccagagggatcggatcgggatcatggcgcggtgaatgtttgcggaccgaatgcagaggatctgtcgggtttggattacccggatacggttgtttttgtgggcgggtttgacccgttgaatgattggcaaaggagatattgtgattggttgaagaaatcaggaaaaaatgctgagttgattgaatatcctaatatgattcatgctttttatatttttcctgatttgccagaagctactcagttgattatgcaagttaaggattttattcacaagagaatttaattataaataatatattgctatgatgataacattaattgataataataaattcagagagcacacagcaatactattggtaattagggaccaatatatggtgttttattgtatgttttagtgtctcacaatttgaagtttgtatttttttttaataagtttgtacctgtcttgaatttagtctatgagttaaatttctgagtgatatagtttggaattgatccacaagttaaaaaaaaaaaaaaaaaaaaaaaa

SEQ ID NO: 455 - protein, 336 aa, Sesbania bispinosa
MSSPNKPKPVLPWKTRLSISLLTALTDASCRSDGTINRRFLSVLDRKASAKATPINGVSTKDVTVNYEHNVWFRLYTPAVTVTGDESDPKTASLPVIIFFHGGGFSYLSPASVAYDAVCRRFCRKISAVVVSINYRLTPEHPYPSQYDDGESVLKFLDENKSVLPENADVSKCFLAGDSAGANLAHHVVVRVCKAGLQRIRILGLISTQPFFGGEERTEAEIHLEGSPLVSMRRTDWLWKVFLPEGSDRDHGAVNVCGPNAEDLSGLDYPDTVVFVGGFDPLNDWQRRYCDWLKKSGKNAELIEYPNMIHAFYIFPDLPEATQLIMQVKDFIHKRI

SEQ ID NO: 456 - DNA, 1294 bp, Sesbania bispinosa
aaaacacacacaattaacaagaattgatcataatgggttcccttccacacctagtagaggattgcatgggttacctccaactctacagcgacggttccattttccgttccaatgacatcaaattccatgtttccgccattgaagacagttccgttaccttcaaggattgcctcttcgacaagagattcaatctctctcttcgcctctacaaaccccaaaattcaaaccctaacaacaccaattgcaatagcaagaagctccctgtggtgatgttccttcacggtggaggattctgtttcggatcacgcacgtggcctcatattcacaactgttgcgtgcgcctctgttccggcctccaagctctggtggttgcaccggattaccgtctggcaccggagcaccggctgccggcggcggtggatgacgccgtggaggcggtgaggtggctgcagaggcaggggctgagcctgaaggaagaaggtggagacccttggttgaatggggacgttgactttgaccgtgtgttcatcgttggtgactcatctggcgggaacattgcgcatcaccttgcggttcggttcggttccggttcgactgaaatggacccggttcggattcgagggtacgtgttattggcgccattttttggtggggtggttcgaaccaaatcagaggaaggtcctcccgaacgcatgttgaaccttgacttactagacagattttggaggctgtctatacctgttggagagggcagagaccacccattggcgaatccattcggacatgggagcccaaatattggagaattgaagcttgaacctattttggtgattgttggtggtaatgaattgcttaaggatagggcagcaaattatgcaacaaggttaaaagaactagggaaggacgttaaatatgttgagtttgagggaagcgaacatggatttttcacccatgattcatactcacaagtttcagaagaggtcatccaaatcatcaaaagattcatggtcgaagcttctagttaattaggagacacagcttaaaataataacaaattgaattaaaaggcaccagcgctgcagataattatttcatatttttagcctatagtagtaaactagattatgggaatgcatgaattatgtcaattttagacttagtggtgtgcagtttaattttgtgttgagattgtagtcaactaccttttttttaatctgtggtataacttatcaattgtataagttattttcaagtggaaatctataaaattcaccaaaaaaaaaaaaaaaaaaaa

SEQ ID NO: 457 - protein, 330 aa, Sesbania bispinosa
MGSLPHLVEDCMGYLQLYSDGSIFRSNDIKFHVSAIEDSSVTFKDCLFDKRFNLSLRLYKPQNSNPNNTNCNSKKLPVVMFLHGGGFCFGSRTWPHIHNCCVRLCSGLQALVVAPDYRLAPEHRLPAAVDDAVEAVRWLQRQGLSLKEEGGDPWLNGDVDFDRVFIVGDSSGGNIAHHLAVRFGSGSTEMDPVRIRGYVLLAPFFGGVVRTKSEEGPPERMLNLDLLDRFWRLSIPVGEGRDHPLANPFGHGSPNIGELKLEPILVIVGGNELLKDRAANYATRLKELGKDVKYVEFEGSEHGFFTHDSYSQVSEEVIQIIKRFMVEASS

SEQ ID NO: 458 - DNA, 1306 bp, Sesbania bispinosa
acacacaattaacaagaattgatcataatgggttcccttccacacctagtagaggattgcatgggttacctccaactctacagtgacggttcaattttccgttccaatgacatcaaattccaagtttccgccattgaagacaattccgttaccttcaaggattgcctcttcgacaagagattcaatctctctcttcgcctctacaaaccccaaaattcaaaccctaacaacaacaattgcaattgcaagatgctccctgtggtgattttccttcacggtggaggattctgtttcggatcacgcacgtggcctcatattcacaactgttgcatgcgcctctgttccggcctccaagctctggtggttgcaccggattaccgtctggcaccggagcaccggccgccggcggcggtggatgacgccgtggaggcggtgaggtggttgcagaggcaggggctgagcctgatggaagaaggtggggacccttggttgaatggggacgttgactttgaccgtgtgttcatcgttggtgactcatctggcgggaacattgcgcatcacctcgcggttcggttcggttccggttcgactgaaatggacccggttcggattcgagggtacgtgttattggcgccattttttggtggggtggttcgaaccaaatcagaggaaggtcctccagaacacatgttgaaccttgacttactagacagattttggaggctgtcgatacctattggagagagcagagaccacccattggcgaatccattcggagctgggagcccaaatattggagaattgaaacttgaacctattttggtgattgttggaggcaatgaattgcttaaggatagggcagcaaattatgcaacaaggttaaaagaactagggaaggacgttaaatatgttgagtttgagggaagcgaacatggatttttcacccatggttcatactcacaagtttcagaggaggtcatccaaatcatcaaaagattcatgctcgaagcttctagttaattaggagacacaacttaaaataataacaaattgaattaaaaggtaccagcgctgcagataattatttcatatttttagcctatagtaattaaagtagtttatgggaatgcatgaattatgtcaattttagatttagtgggtgtgcagtttaattttgtgtggagattgtagtcaactgcctttgtttttagtaatctgtggtatgacttatcaattgtataagttattttcaagtggaaatctataaaattcaccaatattgtagaaaaaaaaaaaaaaaaaaaaa

SEQ ID NO: 459 - protein, 330 aa, Sesbania bispinosa
MGSLPHLVEDCMGYLQLYSDGSIFRSNDIKFQVSAIEDNSVTFKDCLFDKRFNLSLRLYKPQNSNPNNNNCNCKMLPVVIFLHGGGFCFGSRTWPHIHNCCMRLCSGLQALVVAPDYRLAPEHRPPAAVDDAVEAVRWLQRQGLSLMEEGGDPWLNGDVDFDRVFIVGDSSGGNIAHHLAVRFGSGSTEMDPVRIRGYVLLAPFFGGVVRTKSEEGPPEHMLNLDLLDRFWRLSIPIGESRDHPLANPFGAGSPNIGELKLEPILVIVGGNELLKDRAANYATRLKELGKDVKYVEFEGSEHGFFTHGSYSQVSEEVIQIIKRFMLEASS

SEQ ID NO: 460 - DNA, 1135 bp, Sesbania bispinosa
actcctcttccattctccttattctattctctcccttcaatggcttcaacaaccacccaaaaagaggtagacagagagcttccccctcttctcaaggtctacaaggatggaaccgtggagcgtttcctaggctcttcctttgtgccaccctcccctgaagatcctgaaacaggggtctcatcaaaagacatagtcatctcagaaaacccctccatctctgctcgccttcaccttccaaaactcatcaaccatgaaagccaaaagcttccaatcttggtctactatcatggtggtgccttttgccttgaatcagccttctccttcctccaccaacgttaccttaacattgtggcttcccaagcaaatgttctagtggtttctgtggagtacaggctcgccccagagcaccctttaccagcagcatatgaagatggttgggctgcgctcaaatgggtcacctctcattccaccaacaaccccacaaacagtgaaccatggttgatcaaacatggtgatttcaacaggttttacattggaggtgacactgcaggtgcaaatattgcacataatgcagctcttcgtgttggtggtggggttgagactttacctggggatgtgaaaatttcaggggcactccttgcttttcctctgttttggagttccaaaccagttttgtcagaacctgttgaggggcatgaacagagctcacctatgcaagtgtggaactttgtgtacccagatgcaccaggtggcatagataacccactcatcaatcctttggcacctagtgctcccagtttggccacacctgggtgccccaagatactgatttttgttgcagggaaggatgatcttagagacagagggatttggtactatgaggctgtcaagaaaagtgggtggaacggtgatgtggaactcattcaagtggaagatgaggaacattgcttccagatctaccatcctgaaactgaaaattctaaaaatatgatcaatcgcatagcttctttccttgtttgaccacaaatttcggattatttatgtaactttttttaatgtttgtgataaattgatggaccagggttcctgagtggtaataaattggagtatcatgagccaaaaaaaaaaaaaaaaa

SEQ ID NO: 461 - protein, 326 aa, Sesbania bispinosa
MASTTTQKEVDRELPPLLKVYKDGTVERFLGSSFVPPSPEDPETGVSSKDIVISENPSISARLHLPKLINHESQKLPILVYYHGGAFCLESAFSFLHQRYLNIVASQANVLVVSVEYRLAPEHPLPAAYEDGWAALKWVTSHSTNNPTNSEPWLIKHGDFNRFYIGGDTAGANIAHNAALRVGGGVETLPGDVKISGALLAFPLFWSSKPVLSEPVEGHEQSSPMQVWNFVYPDAPGGIDNPLINPLAPSAPSLATPGCPKILIFVAGKDDLRDRGIWYYEAVKKSGWNGDVELIQVEDEEHCFQIYHPETENSKNMINRIASFLV

SEQ ID NO: 462 - DNA, 1392 bp, Sesbania bispinosa
gagaaggcgaagagatgataaggtacgcaggagccactggacaccaatacctgaaatatctccatgtcccaacaaaagcaaacttcccactagtgaatctgattagccattccttccctctccaacttccccttatagcatataagcctcatttacttccctctctgaaactaaaaaaacctttacactgtacaccaccctcatcaaccatggacgcaacctctaccgacagtgaaatagcctttgatatctctcccatcatgaaagtctacaaaaacggtcgtgtggagaggctagctggtgaagaagttgttcctccttcccttgatcccaaaaccaacgttgaatctaaagacgtcgtaatctccaaagaagatggcatatccgcgaggcttttcattcccaaaaccaattatcctccatcccaaaagctccctctctttgtttacttccacggtggtgcattctgcatcgaaaccccattctccccaaactaccacaacttcgttaacactgttgtctcaatgactaacacgattggtgtctctgttcactacaggagagccccagagcaccctgttccaatcgcccatgaagattcatggcgtgccctgaaatgggtcgcttcccatgctggtggaaatggccctgacgagtggctgaatctccatgctgattttgggaaggtgttcttctcaggggacagtgctggtgccaacatttcacactatttgggtattcgggttggcacagaagggttgcctggtgtgaagcttgaagggattgcgttggtgcatccttatttctggggagtggatcgaattgggtctgagggggaaagggctgaacattcgtcgaaggtgaatgatttatggcgtttttcatgtccaaccacgactggatccgatgacccgctaatcaacccggctaaggatccgaatctggggcggttaggttgtagcagagtgcttgtttgtgttgctgggaacgatttgttgaaggacagaggttggaattacaaagagttgcttgagaagagtgggtggtctggaccagtgcaagtgatggaagcaaaggatgaggaacatgtgtttcatatattcaaaccaacctgtgataatgctctggctttgctggaccaaattgcttcctttatcaaacataattgaacattatcatgtttccttctatttttttttattatccattttatttttcatgaataaatggaatctttaccggccacactagttctacttagcttatataggattctctcgagagaataactgtggtccagagtaaaaatgctattttcttgtatccaatagggaaataggctatatctaatgaaggaaaattagtttttaaaaaaaaaaaaaaaaaaaaaaa

SEQ ID NO: 463 - protein, 384 aa, Sesbania bispinosa
MIRYAGATGHQYLKYLHVPTKANFPLVNLISHSFPLQLPLIAYKPHLLPSLKLKKPLHCTPPSSTMDATSTDSEIAFDISPIMKVYKNGRVERLAGEEVVPPSLDPKTNVESKDVVISKEDGISARLFIPKTNYPPSQKLPLFVYFHGGAFCIETPFSPNYHNFVNTVVSMTNTIGVSVHYRRAPEHPVPIAHEDSWRALKWVASHAGGNGPDEWLNLHADFGKVFFSGDSAGANISHYLGIRVGTEGLPGVKLEGIALVHPYFWGVDRIGSEGERAEHSSKVNDLWRFSCPTTTGSDDPLINPAKDPNLGRLGCSRVLVCVAGNDLLKDRGWNYKELLEKSGWSGPVQVMEAKDEEHVFHIFKPTCDNALALLDQIASFIKHN

SEQ ID NO: 464 - DNA, 1349 bp, Sesbania bispinosa
gcatctcgaaatcaatggcttccaccaccaccaccaccaccgttaccgattcaactaaacacataatctcagaacttccttcctatatcaccgtctacaacgacggcaccatcgaacgaccacgacaagccccaacagtgccacccaatctcaacgatccaaactcccccgtctcatccaaagacatcgtcatctctcaaaaccccaacgtctccgctcgtctctatctcccaaaaaaccccacccaaaaactcctcatcttagtattcttccacggcggtggactcttcttcgaatcagctttttccaaaccttaccatgaacacttcaacatcttcgctcctcaagcaaacaccatagtcgtttccgtcgaataccgtctcgctccagaacaccctcttcctgcagcgtaccatgactgctggagttcactacaatgggttgcttctaaccaagaaccgtggctaaccaaccatggtgatttaaacagaattttcattggtggtgacagtgctggtgggaacatagttcataacatcgctatgcgtgctggttctgaagctttaccgaatgatgttaaagttttaggagctattttacaacacccttttttctatggttcaaaccctgttggattagaaggtgttaaactcaagagttctgatcatgatttttactgttccgtttggaatttcgtgtatccatcagcaccgggtggaattgataaccttcatgttaatcctttgggtttaaaggcaccgagtttggaaggacttggttgtgataagatgatcgtttgtgttgctgggaaagatggaattagagagagaggggtttggtattatgaaatagtgaaaaagagtggttggaaagggaaattggaattgtttgaagaagaaggcgaagatcatgtttatcatatcttttatcctgagtctgagaatggtcagaaattgatcaaacgattggcttcttttctccatgagtagagaaaagtgtttctttcatggagagaaaagtgttcctttctattcctctggtctttattataaatatagatcagataaatgaatgctgttttagattgcaatagtattgctaataataatgttttcctgtgatcaggaataatagttatgggttttcttcttcttaattgttgtgacaaagtgcagtggatttagtttttttttttttggtttgttattgtgaaattaaagagttgtgtataattaggcctgctaatggggtgaggtgagtttagctaatttcctatcctcgtatccgtatctgatttttttgttatagacccgtcttagtcccttaaaaaaaaaaaaaaaaaaaaaaaa

SEQ ID NO: 465 - protein, 324 aa, Sesbania bispinosa
MASTTTTTTVTDSTKHIISELPSYITVYNDGTIERPRQAPTVPPNLNDPNSPVSSKDIVISQNPNVSARLYLPKNPTQKLLILVFFHGGGLFFESAFSKPYHEHFNIFAPQANTIVVSVEYRLAPEHPLPAAYHDCWSSLQWVASNQEPWLTNHGDLNRIFIGGDSAGGNIVHNIAMRAGSEALPNDVKVLGAILQHPFFYGSNPVGLEGVKLKSSDHDFYCSVWNFVYPSAPGGIDNLHVNPLGLKAPSLEGLGCDKMIVCVAGKDGIRERGVWYYEIVKKSGWKGKLELFEEEGEDHVYHIFYPESENGQKLIKRLASFLHE

SEQ ID NO: 466 - DNA, 1223 bp, Sesbania bispinosa
attcatacaaacaaagctacacttccaccttacattttttctatctatgcgcttccctttaattaaaaagaaataatggcttccaccaacactaaacaaatcgttgtagatcttcccacctggatccgagtcttcagcgatggcaccgtggaacgaccacgaaattttccaatcgttccaccttcactcgacgatccagaaactgaagtctcatccaaagatgttatcatctcacacaaccccgcaatctctgcacgcatttaccttccaaagatcgcaaagtcagaggctttgaaagtccccatctacgtttactttcacgggggtggtttcttctgggaatctgcattctcaaaactcttccatgaccatttcatcaagttggtctctcaagcaaacattttagtcatctctgttgaatacaggcttgctccagagcatcctctccctgcaggttaccatgatggttgggctgctctccaatgggtcgcatcccattctacccaaaacactaccaacaacacagaaccatggttaattgaccatggtgacttcaacagagttttcataggaggagacagtgcaggtgccaacatcgcgcataacattatagcctttcgtgcaggggatgaggctaatttgctgggtaatgttaaaatcttaggcgcagttttggcctgcccttatttctatggttcacacccaattggatcagaacctgttacagatatagagcagaatttcttcaatttggtttggaaattagtgtaccattcagcaccgaatgggattgataacccctttattaaccctttggctccaggggcacctagcttggctggacttgcttgttctagaattgttgtgtttgttgctggcaaggatggtttgagggacagaggggtttggtactatgaggctgtaaagaagagtgggtggcaagggaaaattgaactctttgaagagaaggaggaggaccatgattttcatttgctcaaaccagagtcagaggctgccaatataatgatcaaacgcattgcttcttttcttcaagagtactagaaatttagaattgcctttattgtgaggcttattcttcaaatgctattctgcaactggtttgtttgtttgtttagacaccaaattattgtcggagtctatgttggtttgcttgtaacttatggaaaaccggacaattctaaaaaaaaaaaaaaaaaaaaaaa

SEQ ID NO: 467 - protein, 328 aa, Sesbania bispinosa
MASTNTKQIVVDLPTWIRVFSDGTVERPRNFPIVPPSLDDPETEVSSKDVIISHNPAISARIYLPKIAKSEALKVPIYVYFHGGGFFWESAFSKLFHDHFIKLVSQANILVISVEYRLAPEHPLPAGYHDGWAALQWVASHSTQNTTNNTEPWLIDHGDFNRVFIGGDSAGANIAHNIIAFRAGDEANLLGNVKILGAVLACPYFYGSHPIGSEPVTDIEQNFFNLVWKLVYHSAPNGIDNPFINPLAPGAPSLAGLACSRIVVFVAGKDGLRDRGVWYYEAVKKSGWQGKIELFEEKEEDHDFHLLKPESEAANIMIKRIASFLQEY

SEQ ID NO: 468 - DNA, 1262 bp, Sesbania bispinosa
aatttacatctcccactccttcactattccttcccatggagggggactctgtttctaactctgactcacatgaactcgtagctcacgatttccccggcctcatccgtgtcttcaaagacggccgtgtccaaagattcacaggaaccgacgtcgttccaccctcaattgaccctcaagctgccgtttcatccaaagacgtcacaatctaccctgaaaacaacatctccgcacgtatcttcctcccacaactccccaccaaccaccacaaattccctctcctcatttactttcacggcggcggcttctgtgcctcctcccccttcaccgctaagtaccacaactacataaccgctgtaactgccgaagccaaagtcgttgtcgtttccgtcgactacaggttagcaccggagcgcccactccccgctgcctatgaggattcttgggccgcactacagtgggttgcgtctcatcagaataagagtggacccgagccttggttgaatgagcatgcggattttgaaagagttttcttggctggggacagtgctggcgctaacatagttcataatatagctatggtggctggggacccggattttggacttagcatggacattctcggggcttgtctggtccacccgtatttctggggttcgggtccaatcgggtcggaggcattggatccggatgggaaggctgtggtggatcggttatggccgtttctgtgcccctcaatgccggataatgatgacccgcgggttaacccggtggcggagggtgcaccaagcttggcatggctgggttgtaagagggtgctggtgtgtgtggcggagaaggatgtgctgagggacagagggtggctttactttaatgcattgggtcggagcgggtggatgggagtggttgaaattgaggaaactcaagaggaaggtcatgcatttcatctttatgatctgggttgcaacaaggccaaggatttgatcaaatgcatggctgacttcttcaacagagatttgcctccttcaatttaaatttaattttcaatacccaaatttcattttatctttatgttccctattattctttaagcgagcacaaaattgtaaccatatagtattaagccagttcattatagcgtggtctgggggcactgtgaaattcaacaagggctagggaagctgtatcgtgattcaagtttaagcttctattttacattcacaaccacataatttgtttcggttaaaaaaaaaaaaaaaaaaaaa

SEQ ID NO: 469 - protein, 331 aa, Sesbania bispinosa
MEGDSVSNSDSHELVAHDFPGLIRVFKDGRVQRFTGTDVVPPSIDPQAAVSSKDVTIYPENNISARIFLPQLPTNHHKFPLLIYFHGGGFCASSPFTAKYHNYITAVTAEAKVVVVSVDYRLAPERPLPAAYEDSWAALQWVASHQNKSGPEPWLNEHADFERVFLAGDSAGANIVHNIAMVAGDPDFGLSMDILGACLVHPYFWGSGPIGSEALDPDGKAVVDRLWPFLCPSMPDNDDPRVNPVAEGAPSLAWLGCKRVLVCVAEKDVLRDRGWLYFNALGRSGWMGVVEIEETQEEGHAFHLYDLGCNKAKDLIKCMADFFNRDLPPSI

SEQ ID NO: 470 - DNA, 1475 bp, Sesbania bispinosa
accctaaaccaacggaccaaaagtcaccaacaacagaacacaacagaattcaacctccattttctctctagagaccttactcccctctctgcgttctcgaattcaaatggcttccaccgatactaaacaggttgtttcagagattccttcatatatccgagtcttcagtgatggcaccgtggaacgcccgcgcacccacagtgccaccctcgcttgatgacccaaaaacaggactctcatccaaagacatcgtaatctctcaggatcccccaatctctgctcgcctttaccttccaaagctccccaaagtcactaaccaacaccaacccaataaagttcccatcttggtcttctttcacggtggtggattcttctttgaatctgctttctcccagctctaccatgagcacttcaacacctttgttccacaagcaaatgtcatagtcgtttctgtggagtataggcttgctccagagcatcttctccctgcatgttaccatgattgttgggctgcacttcaatgggtcgcttcccattctggaaacaaccccaccaacgcagagccatggttgattaaccatggtgatttcaacagacttttcattgggggtgacagtgctggtgataatattgtgcataacattgccatgcgtgctgggactgaggctttacctaatgatattaagatattaggagctatttatgctcatccttacttctacagttcatacccaattggatcagaacctgttccaaggcctgagcaggacctttgctattcggtttggaagtttgtgtatccatctgcacctggtgggattgataaccctattctcaatccggtggctccaggggcacctagcttggctggacttggctgttcaaagattattgtgtgtgttgctggtaaggataagttgagggatagaggggtttggtactatgaggctgtgaagaaaagtgggtggcaaggggaactggaattgtttgaagagagtgaagaggatcatgtttatcatatcttccatccagaatctgagaatggcaagaaatggatcaaacgcatggtttcgtttctcaatgagtaaaagaactgtctttgcttgatttgtcttgctgtaatttgcgaataataatcataagatggatgctctctttgttttgctaatttataatgctatcttgtgtgatgtactcaagaatcatagtgaagcctactgtgatctatagctgtggagggtgtcaaattatcgctatttataacatttaaccgtttgttttcttagatgattttgggttaatcttcaacagtgatgaagtttagccacaatcatgaaagtgtgtactgtaacacatgtgttgttgtgttcctcacaaattgttttgaaatgtggaggaccttttggtcttgaattgttggatgtaatcacaatcataaagtacagctgcacagtatccgaaaaaaaaaaaaaaaa

SEQ ID NO: 471 - protein, 305 aa, Sesbania bispinosa
MAPWNARAPTVPPSLDDPKTGLSSKDIVISQDPPISARLYLPKLPKVTNQHQPNKVPILVFFHGGGFFFESAFSQLYHEHFNTFVPQANVIVVSVEYRLAPEHLLPACYHDCWAALQWVASHSGNNPTNAEPWLINHGDFNRLFIGGDSAGDNIVHNIAMRAGTEALPNDIKILGAIYAHPYFYSSYPIGSEPVPRPEQDLCYSVWKFVYPSAPGGIDNPILNPVAPGAPSLAGLGCSKIIVCVAGKDKLRDRGVWYYEAVKKSGWQGELELFEESEEDHVYHIFHPESENGKKWIKRMVSFLNE

SEQ ID NO: 472 - DNA, 1177 bp, Sesbania bispinosa
gcatctcgaaatcaatggcttccaccaccaccactaccaccgttaccgattcaactaaacacataatctcagaacttccttcctatatcaccgtctacaacgacggcaccatcgaacgaccacgacaagcaccaacagtaccacccaatctcaacgatccaaactctcccgtctcatccaaagacatcatcatctctcaaaaccccaacgtctccgctcgtctctatctcccaaaataccccacccaaaaactccccatcttagtattcttccacggcggtggattcttcttcgaatcagctttttccaaactttaccatgaacacttcaacatcttcgctcctcaagcaaacaccatagtcgtttccgtcgaataccgtctcgctccagaacaccctcttcctgcagcgtaccatgactgctggagttcactccaatgggttgcttctaaccaagaaccgtggctaaccaaccatggtgatttaaacagaactttcattggtggtgacagtgctggtgggaacatagttcataacatcgctatgcgtgctggttctgaagctttaccgaatgatgttaaagttttaggagctattttacaacacccttttttctatggttcaaaccctgttggattagaaggtgttaaactcaagagttctgatcatgatttttactgttccgtttggaatttcgtgtatccatcagcaccgggtggaattgataaccttcatgttaatcctttgggtttagaggcaccgagtttggaaggacttggttgtgataagatgatcgtttgtgttgctgggaaagatggaattagagagagaggggtttggtattatgaaatagtgaaaaagagtggttggaaagggaaattggaattctttgaagaagaaggtgaagatcatgtttatcatatcttttatcctgagtctgagaatggtcagaaattgatcaaacgattggcttcttttctccatgagtagagaaaagtgttcctttctattcctctggtctttattataaatatagatcagataaatgaatgctgttttagattgcaatagtagcaatcatgagattgcaatagtattgctaataataatgttttcctgtgatcaggaataatagttatgggttttcttcttcttaaaaaaaaaaaaaaaaaaaaaaa

SEQ ID NO: 473 - protein, 324 aa, Sesbania bispinosa
  misc_feature (23)..(23): Xaa can be any naturally occurring amino acid
MASTTTTTTVTDSTKHIISELPXYITVYNDGTIERPRQAPTVPPNLNDPNSPVSSKDIIISQNPNVSARLYLPKYPTQKLPILVFFHGGGFFFESAFSKLYHEHFNIFAPQANTIVVSVEYRLAPEHPLPAAYHDCWSSLQWVASNQEPWLTNHGDLNRTFIGGDSAGGNIVHNIAMRAGSEALPNDVKVLGAILQHPFFYGSNPVGLEGVKLKSSDHDFYCSVWNFVYPSAPGGIDNLHVNPLGLEAPSLEGLGCDKMIVCVAGKDGIRERGVWYYEIVKKSGWKGKLEFFEEEGEDHVYHIFYPESENGQKLIKRLASFLHE

SEQ ID NO: 474 - DNA, 1399 bp, Sesbania bispinosa
aaatgagaaggcgaagagatgataaggtatgcaggagccaccggacaccaatacctgaaatatctccatgtcccaacaaaagcaaacttcccactagtgaatctgattagccattccttccctctccaacttccccttaaaccatataactataagcctcatttccttcgttctctgaaacttaaaaaacctttacactgtacaccaccctcatcaaccatggaagcaagctctactgacagtgaaatagcctttgacatatctcccatcatgaaagtatataaaaacggtcgtgtggagaggctagctggtgaagaagttgttcctccttcccttgatcccaaaaccaacgttgaatctaaagacgtcgtaatctccaaagaagatggcatatccgcgaggctttttattcccaaaaccaattatcctccatcccaaaagctccctctttttgtttacttccacggtggtgccttctgcatcgaaaccccattctccccaaactaccataacttcgttaacactgttgtctcaatgactaacgcgattggcgtctctgttcactacaggagagccccagagcaccctgttcccattgcccatgaagattcatggcgtgccctgaaatgggtcgcttcccatgctgatggaaatggccctgacgagtggctgaatctccatgctgattttgggaaggtgttcttctcaggggacagtgctggtgccaacatttcacactatttgggtattcgggttgggacagaagggttgcctggtgtgaagcttgaagggattgcgttggtgcatccttatttctggggagtggatcgaattgggtctgagggggaaagggctgaacattcgtcgaaggtgaatgatttatggcgtttttcatgcccaacaacgaccggatccgatgacccgataatcaacccggctaaggatccgaatctggggaggttaggttgtagcagagtgcttgtttgtgttgctgggaacgatttgttgaaggatagaggttggaattacaaagagttgcttgagaaaagtgggtggtctggaccagtgcaagtgatggaagcaaaggatgaggaacatgtgtttcatatgttcaaaccaacctgtgataatgctctggctttgctggaccaaattgcttcctttatcaaacagaattgaacaatattatcatgcattttacttttcaataaatggaatcattaccggccacagttcctagttctacttagcttatataggattctctcgagagaataactgtggtccagagtaaaaatgcaatattttcttgtatccaataggcgatatctactgaagaaaaattaattatatgagctttctcgtctagtattacgaaaaaaaaaaaaaaagaaaaaaa

SEQ ID NO: 475 - protein, 386 aa, Sesbania bispinosa
MIRYAGATGHQYLKYLHVPTKANFPLVNLISHSFPLQLPLKPYNYKPHFLRSLKLKKPLHCTPPSSTMEASSTDSEIAFDISPIMKVYKNGRVERLAGEEVVPPSLDPKTNVESKDVVISKEDGISARLFIPKTNYPPSQKLPLFVYFHGGAFCIETPFSPNYHNFVNTVVSMTNAIGVSVHYRRAPEHPVPIAHEDSWRALKWVASHADGNGPDEWLNLHADFGKVFFSGDSAGANISHYLGIRVGTEGLPGVKLEGIALVHPYFWGVDRIGSEGERAEHSSKVNDLWRFSCPTTTGSDDPIINPAKDPNLGRLGCSRVLVCVAGNDLLKDRGWNYKELLEKSGWSGPVQVMEAKDEEHVFHMFKPTCDNALALLDQIASFIKQN

SEQ ID NO: 476 - DNA, 1276 bp, Sesbania bispinosa
aatctgcatctcccactccttcactattccttcccatggaagtggactctgtttctgactctgactcacatgaactcgtagctcacgatttcccaggcctcatccgtgtcttcaaagacggccgtgtccagagattcacaggaaccgacgtcgttccaccctcaattgaccctcaagctgccgtttcatccaaagacgtcacaatctaccctgaaaacatttccgcacgtctcttcctcccacaactccccaccaaccaccacaaacttcctctcctcatttactttcacggcggcggcttctgtgcctcctcccccttcaccgctaagtaccacaactacataaccgctgtaactgccgaagccaaagtcgttgtcgtctccgtcgactacaggttagcaccggagcaccctctccccgctgcctatgaggattcttgggccgcactacagtgggttgcgtctcatcagaataagagtggacccgagccttggttgaatgagcatgcggattttgaaagagttttcttggctggggacagtgctggcgctaacatggttcataatatagctatggtggctggggacccggattttgggcttagcatggacattctcggggcttgtcttgtccacccgtatttctggggttcgggtccaatcgggtcagaggcattggatccggataggaaggctgtggtggatcggttatggccgtttctgtgcccctcaatgccggataatgatgacccacgggttaacccggtggcagagggtgcacccagcttggcatggctgggttgtaagagggtgctggtgtgtgtagcggagaaggatgtgctgagggacagagggtggctttactttaatgcattgggtcggagcgggtggatgggggtggtggaaattgaggagactcaagaggagggtcatgcatttcatctttatgatctgggttgcaacaaggccaaagatttgatcaaatgcacggctgacttcttcaacagagatttgcctccttcaatttaaatttagttttcaatacccaatattacattctatctttatgttctctctgtattatgttttctttaagtgagcacacaaactgtaaccatataatataagccagttcattgatgcgtggtctggggggcagtctgaaattcaacaagggctagggaagctgtattgtgattcaagtttaagcttccattttacattcacaaccacataatttgtttcgtttacaaaaaaaaaaaaaaaaaaaaaaaaaa

SEQ ID NO: 477 - protein, 330 aa, Sesbania bispinosa
MEVDSVSDSDSHELVAHDFPGLIRVFKDGRVQRFTGTDVVPPSIDPQAAVSSKDVTIYPENISARLFLPQLPTNHHKLPLLIYFHGGGFCASSPFTAKYHNYITAVTAEAKVVVVSVDYRLAPEHPLPAAYEDSWAALQWVASHQNKSGPEPWLNEHADFERVFLAGDSAGANMVHNIAMVAGDPDFGLSMDILGACLVHPYFWGSGPIGSEALDPDRKAVVDRLWPFLCPSMPDNDDPRVNPVAEGAPSLAWLGCKRVLVCVAEKDVLRDRGWLYFNALGRSGWMGVVEIEETQEEGHAFHLYDLGCNKAKDLIKCTADFFNRDLPPSI

SEQ ID NO: 478 - DNA, 1275 bp, Sesbania bispinosa
aacatatcctatcttagttttgttcatcaaatactatggttcaagaaaagaagctagtcgatgaagtgtccggttggcttagaatctacgatgacggttcagtggaccggacatggtacggtccacctgaggtcaatttcatgattgaaccggttgctccccatgagcatttcattgatggagttgccatacgtgatgttaccatgaacactatcaccgatgacgacttcatccaccgtgctcggttatacctaccggagaaaacaccaaaggaaaatgagaaattgcccatactcgtgcactttcacggaggcggtttttgcattatcgaaccggattggttcatgtactataaggtttacactcagtttgttaagtctactcggtctatttgtgtctccccgttcctcagacgagccccggagcatcgtcttcccgctgccattgatgacgggttggcaacgctccgttggcttcaatctgtggccaagggagacacgcgtgacgagtggcttgagaaacacggcgactttgacagagtttttctcataggagatagctctggaggaaatttagtccatgaagtgtctgctagagcaagcacaaccgagctgagaccagttcgactcgcaggagcaattcccatccatcccgggtatgtccggtcggagcgaagccgatcaggaaatgaaatgccagaatctccatttcttacactggacatgctggacaaattcttgagtttatcactaccaatcggtggcaacaaggaccatcccatcacgtgcccgatgggcgaggcggcgccgactcttgccggcctcaaactgccgccatatcttctctgcgtagctgaaaaagacctattgagggacacacaaatggagtactatgaagccatgaagaaggccaataaagaagtggatctgtttgtgagcaaggaaatgacacatagtttctatctcaacaagattgctgtggatatggatcccacagtcaatgctgaaatgaatgcactcattggtagggttaaggattttattgagaagcattaaattttgaaaatatatgtcttgtttaaggttgattgctatgtgcggcggttgtcatgtttccttatgtgtggcggttgttatgtttccgtatgaatgtgttgttaccttttttatgttaataataagcaatcgaaagccaatttggattctatattgtataattcacttttttaattgtattgacttatgaaattttaaccaaaaaaaaaaaaaaaaaaaa

SEQ ID NO: 479 - protein, 339 aa, Sesbania bispinosa
MVQEKKLVDEVSGWLRIYDDGSVDRTWYGPPEVNFMIEPVAPHEHFIDGVAIRDVTMNTITDDDFIHRARLYLPEKTPKENEKLPILVHFHGGGFCIIEPDWFMYYKVYTQFVKSTRSICVSPFLRRAPEHRLPAAIDDGLATLRWLQSVAKGDTRDEWLEKHGDFDRVFLIGDSSGGNLVHEVSARASTTELRPVRLAGAIPIHPGYVRSERSRSGNEMPESPFLTLDMLDKFLSLSLPIGGNKDHPITCPMGEAAPTLAGLKLPPYLLCVAEKDLLRDTQMEYYEAMKKANKEVDLFVSKEMTHSFYLNKIAVDMDPTVNAEMNALIGRVKDFIEKH

SEQ ID NO: 480 - DNA, 1276 bp, Sesbania bispinosa
aatactctctctcactccctagtccctacctctgttcccaaattccaaatggaaccaaccaatccagaaatctctgttgaggttcctccataccttcgagtacacaaggatgggactattgagagactagccggtacccaagttgttcctgcgggctttgattccgaaaccaacgtagtttccaaagacatcctcatcataccagaaactggtgtcacagccaggctatattgtcccaatttcacccacaaaaatgtgaagcttcctttagttctctacttccatggtggggactattgcatctcttctccctccgatcccctctaccataactccctcaacaaactcgtagctgaggctaatgttgttgctgtctccgttaattatcggttagcaccagaacatccacttccagctgcataccaagattcttgggctgctgttcaatgggttgcctctcatgctgccccagatggtgaagggcatgaaaactggctcatggacaaagttgactttagcagggtgttcttagtaggtgatagcgcaggtgccaacattggacactacatggctgtgaggttgcatgttctgagctctggtcagttcaaggtcccgggtcttatcatggtccatccttatttctgggggaaggaaccaattggtgtggagatcactgatccagagaggaagaaaatggtggacaagtggtgggattttgtttgtccttctgataaagggaatgatgatcccctaattaacccgtttgtggaggaggctccagatcttaaaggtgtgggttgcaacaaggtgcttgttactattgctgagaaagacatactgagggatagagggaagctttatcataaaaaattggtgaatagtggttggaagggaacggctgagttttatgagactcaaggggaggatcatgtctttcacatcttcaacccaaattctgacaaagccaagagcttgattaaacgcatagctgctttcatcaatgaacagtgaagctttatagtgtgtgttggaatgtaataagtgtaaggaaagctacagctataagttgcagttgtgtttttaattaaagaaagttgactcaaggtggttaccttacctccactagtgaacagatctctgattttgtgcttctcatatttcactgttagaaattcatacaacttgttttgcttccctgtttccaattattgttatatgcttcattacatacatagcaatattgtatattctacaaaaaaaaaaaaaaaaaaaaaaa

SEQ ID NO: 481 - protein, 320 aa, Sesbania bispinosa
MEPTNPEISVEVPPYLRVHKDGTIERLAGTQVVPAGFDSETNVVSKDILIIPETGVTARLYCPNFTHKNVKLPLVLYFHGGDYCISSPSDPLYHNSLNKLVAEANVVAVSVNYRLAPEHPLPAAYQDSWAAVQWVASHAAPDGEGHENWLMDKVDFSRVFLVGDSAGANIGHYMAVRLHVLSSGQFKVPGLIMVHPYFWGKEPIGVEITDPERKKMVDKWWDFVCPSDKGNDDPLINPFVEEAPDLKGVGCNKVLVTIAEKDILRDRGKLYHKKLVNSGWKGTAEFYETQGEDHVFHIFNPNSDKAKSLIKRIAAFINEQ

SEQ ID NO: 482 - DNA, 1237 bp, Sesbania bispinosa
acgatttgatttttgtagatactcctactcttatataaaagccaaatactcatctgttttggtgcatctcgaaatcaatggcttccaccaccaccaccaccaccgttaccgattcaactaaacacataatctcagaacttccttcctatatcaccgtctacaacgacggcaccatcgaacgaccacgacaagccccggcagtgccacccaatctcaacgatccaaactcccccgtctcatccaaagacatcgtcatctctcaaaaccccaacgtctccgctcgtctctatctcccaaaaaaccccacccaaaaactccccatcttagtattcttccacggcggtggattcttcttcgaatcagctttttccaaactttaccatgaacacttcaacatcttcgctcctcaagcaaacaccatagtcgtttccgtcgaataccgtctcgctccagaacaccctcttcctgcagcgtaccatgactgctggagctcactacaatgggttgcttctaaccaagaaccgtggctaaccaaccatggtgatttaaacagaattttcattggtggtgacagtgctggtgggaacatagttcataacatcgctatgcgtgctggttctgaagctttaccgaatgatgttaaagttttaggagctattttacaacacccttttttctatggttcaaaccctgttggattagaaggtgttaaactcaagagttctgatcatgatttttactgttccgtttggaatttcgtgtatccatcagcaccgggtggaattgataacgttcatgttaatcctttgggtttagaggcaccgagtttggaaggacttggttgtgataagatgatcgtttgtgttgctgggaaagatggaattagagagagaggggtttggtattatgaaatagtgaaaaagagtggttggaaagggaaattggaattctttgaagaagaaggtgaagatcatgtttatcatatcttttatcctgagtctgagaacggtcagaaattgatcaaacgattggcttcttttctccatgagtagagaaaagtgttcctttctattcctctggtctttattgtaaatatagatcagataaatgaatgctgttttagattgcaatagtagcaatcatgagattgcaatagtattgctaataataatgttttcctgtgatcaggaataatagttatgggttttcttctaaaaaaaaaaaaaaaaaaaaaaaa

SEQ ID NO: 483 - protein, 324 aa, Sesbania bispinosa
MASTTTTTTVTDSTKHIISELPSYITVYNDGTIERPRQAPAVPPNLNDPNSPVSSKDIVISQNPNVSARLYLPKNPTQKLPILVFFHGGGFFFESAFSKLYHEHFNIFAPQANTIVVSVEYRLAPEHPLPAAYHDCWSSLQWVASNQEPWLTNHGDLNRIFIGGDSAGGNIVHNIAMRAGSEALPNDVKVLGAILQHPFFYGSNPVGLEGVKLKSSDHDFYCSVWNFVYPSAPGGIDNVHVNPLGLEAPSLEGLGCDKMIVCVAGKDGIRERGVWYYEIVKKSGWKGKLEFFEEEGEDHVYHIFYPESENGQKLIKRLASFLHE

SEQ ID NO: 484 - DNA, 1149 bp, Sesbania bispinosa
atctcgaaatcaatggcttccaccaccaccaccaccaccgttaccgattcaactaaacacataatctcagaacttccttcctatatcaccgtctacaacgacggcaccatcgaacgaccacgacaagcaccaacagtaccacccaatctcaatgatccaaactcccccgtctcatccaaagacatcatcatctctcaaaaccccaacgtctccgctcgtctctacctcccaaaaaaccccacccaaaaactccccatcttagtattcttccacggcggtggattcttcttcgaatcagctttttccaaactttaccatgaacacttcaacatcttcgctcctcaagcaaacaccatagtcgtttccgtcgaataccgtctcgctccagtacaccctcttcctgcagcgtaccatgactgctggagttcactccaatgggttgcttctaaccaagaaccgtggctaaccaaccatggtgatttaaacggaattttcattggtggtgacagtgctggtgggaacatagttcataacatcgctatgcgtgctggttctgaagctttaccgaatgatgttaaagttttaggagctattttgcaacacccttttttctatggttcacaccctgttggattagaaggtgttaaactcaagagttctgatcatgatttttactgttccgtttggaatttcgtgtatccatcagcaccgggtggaattgataaccttcatgttaatcctttgggtttagaggcaccgagtttggaaggacttggttgtgataagatgatcgtttgtgttgctgggaaagatggaattagagagagaggggtttggtattatgaaatagtgaaaaagagtggttggaaagggaaattggaattctttgaagaagaaggtgaagatcatgtttatcatatcttttatcctgagtctgagaatggccaaaaattgatcaaacgattggcttcttttctccatgagtagagaaaagtgttcctttctattcctctggtctttattataaatatagatcagataaatgaatgctgttttagattgcaatagtattgctaataataatgttttcctgtgatcaggaataatagttatgggttttcttcttcgtaaaaaaaaaaaaaaaaaaaa

SEQ ID NO: 485 - protein, 324 aa, Sesbania bispinosa
MASTTTTTTVTDSTKHIISELPSYITVYNDGTIERPRQAPTVPPNLNDPNSPVSSKDIIISQNPNVSARLYLPKNPTQKLPILVFFHGGGFFFESAFSKLYHEHFNIFAPQANTIVVSVEYRLAPVHPLPAAYHDCWSSLQWVASNQEPWLTNHGDLNGIFIGGDSAGGNIVHNIAMRAGSEALPNDVKVLGAILQHPFFYGSHPVGLEGVKLKSSDHDFYCSVWNFVYPSAPGGIDNLHVNPLGLEAPSLEGLGCDKMIVCVAGKDGIRERGVWYYEIVKKSGWKGKLEFFEEEGEDHVYHIFYPESENGQKLIKRLASFLHE

SEQ ID NO: 486 - DNA, 1137 bp, Sesbania bispinosa
cactcctcttccactctccttattctaatctctcccttcaatggcttctgcaaccacccaaaaagaggtagtcagagagcttccccctcttctcaaggtctacaaagatggaaccgtggagcgtttcctaggctcttcctttgtgccaccctcccctgaaggccctgaaacaggggtctcatcgaaagacatagtcatctcagaaaacccctccatctctgctcgccttcaccttccaaaactcatcaaccatgaaagccaaaagcttccaatcttggtctactatcatggtggtgccttttgccttgaatcagccttctccttcctccaccaacgctaccttaacattgtggcttcccaagcaaatgttctagtggtttctgtggagtacaggctcgccccagagcaccctttaccagcagcatatgaagatggttgggctgctctcaaatgggttacctctcattccaccaacaaccccatcaacagtgaaccatggttgattaaacatggtgatttcaacaggttttacataggaggtgacactgcaggtgcaaatattgcacataatgcagctcttcgagttggtggtggggttgagactttacctggggatgtgaaaatttcaggggcactccttgcttttcctctgttttggagttccaaaccagttttgtcagaacctgttgaggggcatgaacagagctcacctatgcaagtgtggaactttgtgtacccagatgcaccaggtggcatagataacccactcatcaatcctttggcacctggggctcccagcttggccacacttgggtgccccaagatactggtttttgttgcagggaaggatgatcttagagacagagggacttggtactatgaggctgtcaagaaaagtgggtgggaaggtgatgtggaactcattcaagtggaagatgaggaacattgcttccagatctaccatcctgaaactgagaattctaaaaatatgatcaatcgcatagcttctttccttgtttgaccataaatttcggattattatgtaattttttttaatgtttgtgataaattgatggaccagggtcctgagtggtaataaattggagtatcatgagcaaaaaaaaaaaaaaaaaaaaa

SEQ ID NO: 487 - protein, 326 aa, Sesbania bispinosa
MASATTQKEVVRELPPLLKVYKDGTVERFLGSSFVPPSPEGPETGVSSKDIVISENPSISARLHLPKLINHESQKLPILVYYHGGAFCLESAFSFLHQRYLNIVASQANVLVVSVEYRLAPEHPLPAAYEDGWAALKWVTSHSTNNPINSEPWLIKHGDFNRFYIGGDTAGANIAHNAALRVGGGVETLPGDVKISGALLAFPLFWSSKPVLSEPVEGHEQSSPMQVWNFVYPDAPGGIDNPLINPLAPGAPSLATLGCPKILVFVAGKDDLRDRGTWYYEAVKKSGWEGDVELIQVEDEEHCFQIYHPETENSKNMINRIASFLV

SEQ ID NO: 488 - DNA, 1247 bp, Sesbania bispinosa
atctcgaaatcaatggcttccaccaccaccactaccaccgttaccgattcaactaaacacataatctcagaacttccttcctatatcaccgtctacaacgacggcaccatcgaacgaccacgacaagcaccaacagtaccacccaatctcaacgatccaaacccccccgtctcatccaaagacatcatcatctctcaaaaccccaacgtctccgctcgtctctacctcccaaaaaaccccacccgaaaactccccatcttagtattcttccacggcggtgggttcttcttcgaatcagctttttccaaactttaccatgaacacttcaacatcttcgctcctcaagcaaacaccatagtcgtttccgtcgaataccgtctcgctccagaacaccctcttcctgcagcgtaccatgactgctggagttcactcaaatgggttgcttctaaccaagaaccgtggctaaccaatcatggggatttaaatagaattttcattggtggtgacagtgctggtgggaacatagttcataacatcgctatgcgtgctggttctgaagctttaccgaatgatgttaaaattttaggagctattttacaacacccttttttctatggttcacgccctgttggattagaaggtgttaaactcaagagttctgatcatgatttttactgttccgtttggaatttcgtgtatccatcagcaccgggtggaattgataaccttcatgtgaatcctttgggtttagaggcaccgagtttgaaaggacttggttgtgataagatgatcgtttgtgttgctgggaaagatggaattagagagagaggggtttggtattatgaaatagtgaaaaagagtggttggaaagggaaattggaattctttgaagaagaaggtgaagatcacgtttatcatatcttttatcctgagtctgagaatggtcagaaattgatcaaacgattggcttcttttctccatgagtagagaaaagtgttcctttctattcctctagtctttattataaatatagatcagataaatgaatgctgttttatattgcaatagtagcaatcatgagattgcaatagtattgctaataataatgttttctccttcttaattgttgtgacaaagtgcagtggatttagttttttttttggtttgttattatgaaattaaagagttgtgtataattaggcctgataatggggtgaggtgagtttagccaaaaaaaaaaaaaaaaa

SEQ ID NO: 489 - protein, 324 aa, Sesbania bispinosa
MASTTTTTTVTDSTKHIISELPSYITVYNDGTIERPRQAPTVPPNLNDPNPPVSSKDIIISQNPNVSARLYLPKNPTRKLPILVFFHGGGFFFESAFSKLYHEHFNIFAPQANTIVVSVEYRLAPEHPLPAAYHDCWSSLKWVASNQEPWLTNHGDLNRIFIGGDSAGGNIVHNIAMRAGSEALPNDVKILGAILQHPFFYGSRPVGLEGVKLKSSDHDFYCSVWNFVYPSAPGGIDNLHVNPLGLEAPSLKGLGCDKMIVCVAGKDGIRERGVWYYEIVKKSGWKGKLEFFEEEGEDHVYHIFYPESENGQKLIKRLASFLHE

SEQ ID NO: 490 - DNA, 1253 bp, Sesbania bispinosa
aagctccattttctctctagaaacctcactcccctccctgtgttcttgaattcaaatggcatccaccgatactaaacaggttgtttcagagattcctacatatatccgagtcttcagtgatggcaccgtggaacgcccccgacaagcacccacagtgccaccctcacttgatgacccaaaaacaggactctcatccaaagacatcataatctctcaggatccctcaatctctgctcgcctttacctcccaaagctccccaatgtcagtgaccaacaccaacccaataaagttccaatcttggtcttctttcatggtggtggattcttctttgaatctgctttctcccagctctaccatgaacacttcaacacctttgttccacaagcaaatgtcatagtcgtttctgtggagtataggcttgctccagaacatcttctccctgcatgttaccatgattgttgggctgcacttcaatgggtcgcttcccattctggaaacaaccccaccaacgcagagccatggttgattaaccatggtgatctaaacagagttttcattgggggtgacagtgctggtggtaatattgtgcataacattgccatgcgtgctgggactgaggctttacctaatgatgttaagatattaggagctatttatgctcatccttacttctacagttcatacccaattggatcagaacctgttccaaggcctgagcaggacctatgctattcggtttggatgtttgtgtatccatctgcacctggtgggattgataaccctatgctcaatccggtggatccaggggcacctagcttggctggacttgggtgttcaaagattattgtgtgtgttgctggtaaggataagttgagggatagaggggtttggtactatgaggctgtgaagaaaagtgggtggcaaggggaactggagttgtttgaagagagtgaagaggatcatgtttatcatatcttccatccagaatctgagaatggcaagaaatggatcaaacgcatggtttcatttctcaatgagtaaaagaattgtctttgcttgatttgtcttgctgtaatttgcgaataataatcataagatgctctctttgttttgctaatttgtaatgctatcttgtgtgatgtactcaagaatcatagtgaagcctgctgtgatctatatagctgtggagggtgtcaaattatcgctatttataacatttaaccgtttgtttcccaaaaaaaaaaaaaaaaaa

SEQ ID NO: 491 - protein, 328 aa, Sesbania bispinosa
MASTDTKQVVSEIPTYIRVFSDGTVERPRQAPTVPPSLDDPKTGLSSKDIIISQDPSISARLYLPKLPNVSDQHQPNKVPILVFFHGGGFFFESAFSQLYHEHFNTFVPQANVIVVSVEYRLAPEHLLPACYHDCWAALQWVASHSGNNPTNAEPWLINHGDLNRVFIGGDSAGGNIVHNIAMRAGTEALPNDVKILGAIYAHPYFYSSYPIGSEPVPRPEQDLCYSVWMFVYPSAPGGIDNPMLNPVDPGAPSLAGLGCSKIIVCVAGKDKLRDRGVWYYEAVKKSGWQGELELFEESEEDHVYHIFHPESENGKKWIKRMVSFLNE

SEQ ID NO: 492 - DNA, 1097 bp, Sesbania bispinosa
actttcactcccaatctttcccttctctccagaaatggatccacaaatctctgtcgacgttccgccttacctccgtgtccacacaaacggaaccgtcgagagactagtcggcattgacgttgctcctgccggcctcgatcctcaaacaaacgttatctccaaagacatcacaattctctcaaaaaccggtgtcacagcaagactctattcacccaccaaaaaaacttcaacaaaacttcctttaattctgtacctccacggtggtgcctattgcatatcttcaccttctgatcctctttaccattactccctcaacaaccttgtagctgaagcaaacatcatcgctatatcggttaattaccggttagcaccggaacatccacttccaactgcatacaatgattcctgggaagcacttcaatgggttgcttcacacgccgtcgaagacggcttcgaccgcttcgagggccaagagaaagaaagctggatcaaagaaaaagttgactttaacagagttttcttagcaggtgacagtgctggcgcaaacatgggacactacatgtgtttaaaggatcacaatttcgtgaacttcaagattttgggtcttattatggtgaatccttacttttgggggaaggaaccgattggtgtggagataagtgattacgaaaggaaaaaaatggttgataaatggtgggaatttgtttgtccttctgataaaggaaatgatgatcctttaattaatccgtatgtggaagaagctcctgatattgaaggattgagtgttgaaaaagtgcttgttactgttgctgagaaagatatattgagggaaagagggaaattttatcataaaaaattggttaacagtagttggaaaggaagtgctgagttttatgaaactcatggggaggatcatgtgtttcatatttttaatccagattgtgataaagctaagagtttgattaaacgcatagctgttttcatcaatgaatagggaagatttacaaaaatacaggcacgtgttgtgtgtggaagcatttgttatttaataataatgagttgtgtttttgtatttaaaaaaaaaaaaaaaaaaaaaa

SEQ ID NO: 493 - protein, 319 aa, Sesbania bispinosa
MDPQISVDVPPYLRVHTNGTVERLVGIDVAPAGLDPQTNVISKDITILSKTGVTARLYSPTKKTSTKLPLILYLHGGAYCISSPSDPLYHYSLNNLVAEANIIAISVNYRLAPEHPLPTAYNDSWEALQWVASHAVEDGFDRFEGQEKESWIKEKVDFNRVFLAGDSAGANMGHYMCLKDHNFVNFKILGLIMVNPYFWGKEPIGVEISDYERKKMVDKWWEFVCPSDKGNDDPLINPYVEEAPDIEGLSVEKVLVTVAEKDILRERGKFYHKKLVNSSWKGSAEFYETHGEDHVFHIFNPDCDKAKSLIKRIAVFINE

SEQ ID NO: 494 - DNA, 1924 bp, Triglochin maritima
aagctcccattcgcattactaaacaccggaacgaaaaaaacaattttaaaaaacacttgctttgctgttcctgttcctgtttctgttctcatttgtgctctctcttctcgcccttctttcttctaccctgcgggatctcaaacccagcgacttgacttccccacagcagcagatcttccttttgaaaggtaggagctacttttgggcttcttcgtgctttgattcttcccctggcgtttacttgtagaaaagggtttgtggaaatggccgggagcaacgaggtcaacgctagcgagtctaagaacgtcgttccgctcaacacatgggtcctcatatccaacttcaagctcgcctacaatctcctccgacgccccgacggcagctttgaccgtcaccttgctgaattcctcgaccgcaaggtccctgccaatgcaactccggtcgatggggtgttttcttttgatttccttatcgaccgctccaccaatcttctcagtcggatataccgccccacttctcatatacccgaaaatctacctgtggtcatctcagaaattggtaccaaaaccaacacaatcaaagaccctttcccggttattatatttttccacggtggtagcttctcccattcgtcttccaacagtgctatctacgattcgctctgccgtcagttggtgaggatgtgcgatgcagttgtgatttcggttaattacaggcgatcgcctgaatatagatacccctgcgcctatgaggatggctgggctgctgttaagtgggctgcaagccggccgtggcttcggagtggaaaggattccagcgtacggattttcctagcaggggacagttccggtggaaacattgcccaccatgtcgccgttagatccattggttcagggatcaagatttacgggaatattcttctcaactcaatgtttggtggggaggaacgaaaggaatccgagttgaaatttgatgggaagtactttgtcaccatccaggacagggattggtactggaaggcctttcttccagagggtgcggaccgtaatcatccagcctgcaacccctttggaccgaacgggataagcatcgagggtcttccgtttccgaagagccttgttgcggtggctggttttgaccttacccgggactggcagcttgaatacgctgaagggctcaaacaagcaaagcaagaggtgaagctcctctacttggagcaggcaaccattggattctacctcttgcccaacaatgatcacttctttgtgctcatggaggaaataaagaatttcgtcaattccgacccttagatggaagatagtgaaacaaaagtataggtatataaacaggaatctaacatttgattttagggtcttagttgtgttctccaaactgaggaacatgtatattactagcagcattatgcctgggttctgctgacagccagccggtgttcggttcctatgcaatgtcagggtgctctgtggaagtgaagtgcaggatcgcacacacggccatcatgtaatcgtacttttatggacagctgaatactactacttatagagttttcagcagtcgttgaagataagacacctaatttccaagcccgaggaatggaggaaaaacaggttgctctgtcagtgaattgctcggcgttcggatggtaaagtaaacatctgttgcagtgttattttgtgaactatgttagctgtagccatactaattctgcttggttcaccaagtatgttaacagttgtgtgttgttggttcgtcttcggcttgcctataacagcatggagctgagaattatcatgtactccactcgttccctgtttgctttgtgttcatttgttcggacatgaatcaacccatggtggtctcctatgtaatggatgccacctatacaacaaaaaaaaaaaaaaaa

SEQ ID NO: 495 - protein, 348 aa, Triglochin maritima
MAGSNEVNASESKNVVPLNTWVLISNFKLAYNLLRRPDGSFDRHLAEFLDRKVPANATPVDGVFSFDFLIDRSTNLLSRIYRPTSHIPENLPVVISEIGTKTNTIKDPFPVIIFFHGGSFSHSSSNSAIYDSLCRQLVRMCDAVVISVNYRRSPEYRYPCAYEDGWAAVKWAASRPWLRSGKDSSVRIFLAGDSSGGNIAHHVAVRSIGSGIKIYGNILLNSMFGGEERKESELKFDGKYFVTIQDRDWYWKAFLPEGADRNHPACNPFGPNGISIEGLPFPKSLVAVAGFDLTRDWQLEYAEGLKQAKQEVKLLYLEQATIGFYLLPNNDHFFVLMEEIKNFVNSDP

SEQ ID NO: 496 - DNA, 2156 bp, Triglochin maritima
gttctcatttgtgctctctctctcgcccttctgtcctccaccctgcgggatctcaaacccggcgaattgacttccccacagcagcaaatcttccttttggtaagggcgttggtggtggggattgtgtgacaggtatttgatgtttctgattggggacttatgtggggatttttctgtccacgtctcatgggatgaagaaaggtaggggccgcttttgggcttcttcgtgctttgattcttcccctggcgttttcttgtagaaaggggtttgtgggaatggctgggagcaacgaggtcaacgccagcgagtccaagaacgtcgttccgctcaacacatgggtcctcatatccaacttcaagctcgcctacaatctcctccgacgccccgacggcagctttgaccgtcaccttgctgaattcctcgaccgcaaggtccctgccaatgccacacccgtagatggggtgttttcctttgatttccttattgaccgctccaccaatcttctcagtcggatataccgccccacttctcatatacccgaaaatccacctgcagtcatctcagaaattggtaccaaaaccaacacaatcaaagaccctttcccggtcattatatttttccacggcggtagcttctcccattcgtcttccaacagtgcaatctacgattcgctctgccgtcagttggtgaggatgtgcgacgcagttgtgatttcggttaattacaggcgatcgcctgaatatagatacccctgcgcctatgaggatggctgggctgctgttaagtgggctgcaagccggccgtggcttcggggcggaaatgattccagtgtacggattttcctagcaggggacagctccggtggaaacattgctcaccatgttgctgttagatccattggttcagggatcacgatttatgggaatattcttctcaactcaatgtttggcggggaggaacgaaaagaatccgagttgaagtttgatgggaagtactttgtcaccatccaggacagggattggtactggaaggcctttcttccagagggtgcggaccgtaatcatccagcctgcaacccctttggaccgaatgggataagcatcaagggtcttccgtttccgaagagccttgttgcggtagctggtttggaccttacccgggattggcagcttgaatacgctgaaggcctcaagcaagcaaagcaagaggtgaagctcctctacttggagcaggcaaccattgggttctacctgttgcccaacaatgatcacttctttgtgctcatggaggaaataaagaatttcgtcaattccgacccttagatggaagatagtgaaacaaaagtataggtatataaacaggaatctgacatttgattttagggtcttagttatgttctccaaactgagcaacatatatattactagcagcattatgcctgggttctgctgacagccagctggtgttcggttcctatgcaatgtcagggtgctctgtggaagtgaagtgcaagatcgcacacacggccatcagataatcgtacttttatgggcagctgaatcctactacttatagagttttcagcagtcgtttaatataagatacctaatttccaagcccgaggaatggaggaaaaacaggttgctgtcagtgaattgcttggcgttcggatggtaaagtaaacatctgttgcagtgttattttgtgaactatattagctgtagccatactaattctgcttggttcaccaagtaagttaacagttctgtgtgttgttggttggtccttggcttgcctataacagcatggagctgagaattatcatgtactccactcgttccctgattgctttgtgttcatttgttcggacatgaatcaacccatggtggtctcctatgtaatggatttcacctgtacaactgtcctgatgatgtgtgtccatggcaaaaaatatttgacttgaattttttatgctcgtattaatcaaggtcatgtttaacgtaaaaaaaaaaaaaaaaaaaaaaaaaaaaaaaaaaaaaaaaaaaaaaaaaaaaaaaaaaaaaaaaaaaaaaaaaaaaaaaaaaaaaaaaaaaaaaaaaaaaaaaaaaaaaaaaaaaaaaaaaaaaaaaaaaaaaaaaaaaaaaaaaaaaaaaaa

SEQ ID NO: 497 - protein, 348 aa, Triglochin maritima
MAGSNEVNASESKNVVPLNTWVLISNFKLAYNLLRRPDGSFDRHLAEFLDRKVPANATPVDGVFSFDFLIDRSTNLLSRIYRPTSHIPENPPAVISEIGTKTNTIKDPFPVIIFFHGGSFSHSSSNSAIYDSLCRQLVRMCDAVVISVNYRRSPEYRYPCAYEDGWAAVKWAASRPWLRGGNDSSVRIFLAGDSSGGNIAHHVAVRSIGSGITIYGNILLNSMFGGEERKESELKFDGKYFVTIQDRDWYWKAFLPEGADRNHPACNPFGPNGISIKGLPFPKSLVAVAGLDLTRDWQLEYAEGLKQAKQEVKLLYLEQATIGFYLLPNNDHFFVLMEEIKNFVNSDP

SEQ ID NO: 498 - DNA, 1325 bp, Triglochin maritima
tacttcactaaaaccaaaaccttttcccaccacttggcaaaacaattagagagactactagtggaaaaactagcttgtagccaattcaacatgggtggcatctcctttgatgacccaagattttcccaccaccaatccaccaccacccgctgccacggcccggtggaggagatcgatggtcttatacgagtctacaaggacggtcgagttgaccgctttccaattgtaagagaagttccaccaacgtatccctccgagcccggtgtgaccgccggagacgtgtcgatagaccaatccactcgcctttgggctcgtgtttacgtgccggttcgggcctcatcgggtgccaaattgccggtgatggtgtacttccatggaggtggtttttgcgtcggttcggctgcttgggtttgctatcatgagttcttgaccaaggtggcggctcgggtcgggtgcgttgtggtttcggttaactaccggttggcgccggagcaccggcttccggcggcttacgaggatggtgttagggcggttaaatgggtgaaacatgtggttcgcggcggtgagtcgggttcttggtgggctaatggctgtgagatgtcgaggctgttcgtcagtggtgatagcgccggagggaccatagcctacaacgtggcacaacgaatcccaacattcctcgccggtgcaattctactgcaacccttcttcggaggagagaagaggactcaatcagagaaaaccgtaccccaaccaccgacctcggccctatctctccccgtgtcagacacctactggcgtctggccttgccagtaggagtaaatcgcgaccaccactactccaacccttcctcccgccctctcaagcacatccgactaccagcattcctcatgagcatagcggagttggacatgttgagggaccgtgaagtggaattctgccggatgttgagagaggccgggaaaagtgtcgaaatggtagtgcacggaggagttgggcatgcatttcatgtgctccagagttccggtttggcgaagaggaggacacaggagatggtgcagcagatcaaggtgtttatgagctccacaagatgatataattaggtcttctgtaagtcatgttgtaatcgtggatgaagctttttgttatttcctttgtttctttgtttgcgcctttgctcttatgtaataatatgtatggtggtcggtcgaagtcgatggacgagatccttgtggatcgagttcaatattgattaagatttaattgtgttgaaggggttatactaatcaatggatgttatatagtacgtaaaaaaaaaaaaaaaaaa

SEQ ID NO: 499 - protein, 333 aa, Triglochin maritima
MGGISFDDPRFSHHQSTTTRCHGPVEEIDGLIRVYKDGRVDRFPIVREVPPTYPSEPGVTAGDVSIDQSTRLWARVYVPVRASSGAKLPVMVYFHGGGFCVGSAAWVCYHEFLTKVAARVGCVVVSVNYRLAPEHRLPAAYEDGVRAVKWVKHVVRGGESGSWWANGCEMSRLFVSGDSAGGTIAYNVAQRIPTFLAGAILLQPFFGGEKRTQSEKTVPQPPTSALSLPVSDTYWRLALPVGVNRDHHYSNPSSRPLKHIRLPAFLMSIAELDMLRDREVEFCRMLREAGKSVEMVVHGGVGHAFHVLQSSGLAKRRTQEMVQQIKVFMSSTR

SEQ ID NO: 500 - DNA, 1283 bp, Triglochin maritima
aacaatgaacttgaactcgaccatcgcctccatgaccggcggcgaccagccatcttccgaactcgactacgacttcgcccccttcctccgcacctacaaggacggccgcgtcgagaggttcctcggcaccgacgtcgtccctccatcccccaccaaccccacctccggcgtcctctccaaggacgtcaccatcaaccccaccaccaacctctccgcccgcctctatatcccgtccaacgtcccctccgggaaaaagctccccgtcctcgtctactaccatggcggcgccttctgcatcgagtcgcctttctcacccacctaccacctttacctcaattcccttgtctgcgcctccaacgtcatcgccgtatccgttcactaccgtctcgcgccggagcaccccctcccggcggcataccacgactcctgggaggcgctccggtgggtcgtatcggctgccgacacgtggttgaaggaccacggggacttcaaccacgtgttcctcgcgggggacagcgccggggcgaatatttgccactgggtggcgatgaaggcgggggaggagccgctcccggaggggagggagatagaaggggtggttcttgtccactcttacttctgggggaaagatccgatcgggtcggaaccgaccgacccggttatgagggggaagatggagagctcgtgggagttcatttgccccgggacgccggtcggggtggacaatccgtgggtgaaccccgtggtgggtggggcccaggatttggcgaagttggcgtgtaaacgcgttctggtgtgcgttggggagatggatctgtttaaggataggggtgtggattattatgagaagttgaaagggagtggatggggtgggaaggcggagctgttggtgtcggaagggcagtatcatgtgttccatctcatggatcccaagtgccagcatgctgtggacaagatggatcgcctcgtcaagttcttccgtgaccagtgttgaaactgtatttgctttggttagagccgaaatcatctgagaagagcagaacaacatcttctaccccgtcatgtttctttcctttttttcctttgctaggagtggatctgaatcagttgtttgatgaggtgcaagacctggatttttgcatttcgtatgtatttttttcttattttgtcaaggcatcggactgccaagctaatatatacccgtaataacaatcacacgttgtaagacaatatttcttaaggttggaaagtttgtgttctgctgctaaaaaaaaaaaaaaaaa

SEQ ID NO: 501 - protein, 329 aa, Triglochin maritima
MNLNSTIASMTGGDQPSSELDYDFAPFLRTYKDGRVERFLGTDVVPPSPTNPTSGVLSKDVTINPTTNLSARLYIPSNVPSGKKLPVLVYYHGGAFCIESPFSPTYHLYLNSLVCASNVIAVSVHYRLAPEHPLPAAYHDSWEALRWVVSAADTWLKDHGDFNHVFLAGDSAGANICHWVAMKAGEEPLPEGREIEGVVLVHSYFWGKDPIGSEPTDPVMRGKMESSWEFICPGTPVGVDNPWVNPVVGGAQDLAKLACKRVLVCVGEMDLFKDRGVDYYEKLKGSGWGGKAELLVSEGQYHVFHLMDPKCQHAVDKMDRLVKFFRDQC

SEQ ID NO: 502 - DNA, 1256 bp, Triglochin maritima
aacacaaacacaccaaacactaatacaagttaattgagacttctcacttggagaattaaaatggccggagatatggcaaaggtggtcgtcgacgaggtgtccggttggcttcgcgtttacgacgatgggtcggtcgaccggacttggaccggaccaccgcaagttaagtttctcgcgagcccgtattatccttctgctcaggaaggactggaaaacgacggcgtggttgtccatgacatagcgattcctccgccgttcgatgtgtccgttcgcgtttatgttcccgttatcgacggcgaggttgagcggaagctcaaactaccattgctcctacactttcagggtggtggcttctgcatcagcagacccacttggtacatgtactaccaattctactctcgtttggcaaccacttgcggcgtggtggtggtctcagtgaccacccgtctcgccccagagcatcgtcttccggccgccatagacgacggctacaatgcccttttatggctacgttctttggcacaagctaaccataagatcaagacggatgtggaggccaaccttctagacaaggttgacttctcaagaattttcctaattggagatagctccggcggtaacctcgtccacgaggtggctgccagagctggtgaagaggaacacaactttttctcaccattaaagcttgctggggctatcccaatccaccctgggtttgtacgctcgacgaggagtagatcggaaatggaggggaaggaagaccctttcttgacactagacatgttggacaaatttctagctttggctcttcctctgggggcaacaaaggaccatccaacgacatgtccaatgggcgaatttgccacaccgatgggtcgcttgaacttaccaccaatgatgctcgtggtggcagataacgacttgatcaaggatactgagctagagtactacgaggccttgaagaaggcaggcaaggatgtggagatggtggtcaattatggcgttggccatagcttttacctcaacaagttggctgttgatcacgatccaacggtcggtaaggcgacaacagagctcattgaggctatcaaagactttgtggatctccgttaattatcatttatccgatcatatatgtatttcaaaataagcaatccgtatgatctcaattacgtctcaaatttggttgtgcgatcaataacttcggtggaaataatagaaaattagctgcgtaaaaaaaaaaaaaaaaaaaaaaa

SEQ ID NO: 503 - protein, 350 aa, Triglochin maritima
MAGDMAKVVVDEVSGWLRVYDDGSVDRTWTGPPQVKFLASPYYPSAQEGLENDGVVVHDIAIPPPFDVSVRVYVPVIDGEVERKLKLPLLLHFQGGGFCISRPTWYMYYQFYSRLATTCGVVVVSVTTRLAPEHRLPAAIDDGYNALLWLRSLAQANHKIKTDVEANLLDKVDFSRIFLIGDSSGGNLVHEVAARAGEEEHNFFSPLKLAGAIPIHPGFVRSTRSRSEMEGKEDPFLTLDMLDKFLALALPLGATKDHPTTCPMGEFATPMGRLNLPPMMLVVADNDLIKDTELEYYEALKKAGKDVEMVVNYGVGHSFYLNKLAVDHDPTVGKATTELIEAIKDFVDLR

SEQ ID NO: 504 - DNA, 1320 bp, Triglochin maritima
aaacacatctacataaattttgctcctccgttaaagggcaaaaaaatggttgctcctcccattatctccgaccatggctacaccttcaaagtcatatactgtcgccttgacaaagacggccacgtcgaacgccttggtggcgaagacatacttcctccggcaaaccctgaccccaccaccctcgtctcgtccatcgacgtcgtcctccaccccgacgtctccgcccggatctacatcccataccacgtcctaactaacaacaataaaaataaaaaactccccgtcctcgtctactaccacggtgggggttacatcatcgagacgccgttctcaccactgtaccacccttacctcaactctctcgtgtccaaatctgacgtcatcgccgtctccgtccactaccgtcgcgccacggaacatcccctccccacagcctacgacgactcctggacagcgctccagtgggtggcgtctcactccaactccaccggtccgaaaacgtggctgaacgaccatgctgacttcacccgtctttacctcgccggcgatagcgccggcggtaacatcgtccacaaccttaccatgcgcatcgggaaagagccgttggggaacggagtgggagtggagggaatcgtcctggtccacccccacttctggggggaggagaggttggaggcggattcgggtacggatccggaggtgttagcggaagtcgatctggtgtggaaggtggtttgcccgtcggcagagaaggggaacgacgatccacgggtcaacccggtggtcgagggcgcgccggacttggccgagttggcgtgcaagagggtgttggtgtgtttggcggagaaggactttttgacggggcgagggtgggtttgctgcgaggcgttgaggaagagcgggtggggtgggacagtcgaggtgttggagacgaagggagaggagcacgtgttccatctgttcaaacctgagtccgataacgccgtggagaagatgaagggagttgtggctttcctcgacgaggtgtagtttgtttgggtcggttttatgggaatttgtttaaagttttgtgaccgtcagtttgttactttgtttgtgtcggtttgttggtgtgggaatttgtttgttgtgtgtgattccgaattggaagtattttatttttcctatggttgcgtgagatgcatgcgaaactgggtatgtattgtatcggtgttattcccaataatcatttgtctatatctggccctcgagcaaaatgaatcaaatattcccacgcaatcttaatttattgtaaaaaaaaaaaaaaaaaaaaaaaaaaaa

SEQ ID NO: 505 - protein, 327 aa, Triglochin maritima
MVAPPIISDHGYTFKVIYCRLDKDGHVERLGGEDILPPANPDPTTLVSSIDVVLHPDVSARIYIPYHVLTNNNKNKKLPVLVYYHGGGYIIETPFSPLYHPYLNSLVSKSDVIAVSVHYRRATEHPLPTAYDDSWTALQWVASHSNSTGPKTWLNDHADFTRLYLAGDSAGGNIVHNLTMRIGKEPLGNGVGVEGIVLVHPHFWGEERLEADSGTDPEVLAEVDLVWKVVCPSAEKGNDDPRVNPVVEGAPDLAELACKRVLVCLAEKDFLTGRGWVCCEALRKSGWGGTVEVLETKGEEHVFHLFKPESDNAVEKMKGVVAFLDEV

SEQ ID NO: 506 - DNA, 1344 bp, Triglochin maritima
aagtaccaaaacctttccccatcacttgggaaaataattagagctggagactactgtctactagtggaaaaactagctagcttgtagccaattcaacatgggtggcatctcctttggcgacccaagattttcccaccaccaatccaccaccaccacccgccgccacgccccggtggaggagatcaatggtcttatacgagtctacaaggacggtcacgttgaccggtttccaattgtaagagaagttccaccaacgtatccctccgagcccggtgtgaccgccggagacgtgtcgatagaccaatccacgcgcctttgggctcgtgtttacgtgccggttcgggcctcatcgggggccaaattgccggtgatggtgtacttccatggaggtggtttttgcatcggttcggctgcttgggtttgctatcatgagttcttggccaaggtggcggctcgggtcgggtgcgttgtggtttccgttaactaccggttggcgccggagcaccggcttccggcggcttacgaggatggtgttagggcggttaaatgggtgagacatgtggttcgcggcggcgagtcgggtttttggtgggctaatggctgtgagctgtcgaggttgttcgttagtggtgatagcgccggagcgaccatagcctacaacgtggcactacaactcccaacattcctcgccggtgtaattctactacaacccttcttcggaggagagaagaggactcaatcagagaaaaccctactccaaccaccgacctcggccctatctctccccgtgtcagacacctactggcgtctggccttgccagtaggagcaaatcgcgaccaccactactccaacccttcctcccgccctctcgagcatatccgactaccaacattcctcatgtgcatagcggagttggacatgttgcaggaccgagaagtggaattctgccggacgttgagagtggcggggaaaagcgtcgaaatggcggtgcatgaaggagttgggcatgcatttcatgtgctccagagttccggtttggcgaagaggaggacacaggagatggtggagaagatcaaggtgtttatgagctctagaagatgatatatgatacacaggagttccggtttaatttgttacttcctttatttctctgtttgttcctttgttgttatgtaatatgtatggtggtcggtcgaagtcgaagtcgatggacgagatccttgtggatcgagttcaatgtagattaagatttaattttgtcgaaggggtcatactaattaatggatgttatatagtacgtaaacaggggactgaaaaagtaaaaaaaaaaaaaaaaaaaaaaa

SEQ ID NO: 507 - protein, 334 aa, Triglochin maritima
MGGISFGDPRFSHHQSTTTTRRHAPVEEINGLIRVYKDGHVDRFPIVREVPPTYPSEPGVTAGDVSIDQSTRLWARVYVPVRASSGAKLPVMVYFHGGGFCIGSAAWVCYHEFLAKVAARVGCVVVSVNYRLAPEHRLPAAYEDGVRAVKWVRHVVRGGESGFWWANGCELSRLFVSGDSAGATIAYNVALQLPTFLAGVILLQPFFGGEKRTQSEKTLLQPPTSALSLPVSDTYWRLALPVGANRDHHYSNPSSRPLEHIRLPTFLMCIAELDMLQDREVEFCRTLRVAGKSVEMAVHEGVGHAFHVLQSSGLAKRRTQEMVEKIKVFMSSRR

SEQ ID NO: 508 - DNA, 1334 bp, Triglochin maritima
aagtaccaaaacctttccccaccacttgggaagataattagagagactactagtggaaaaactagcttgtagccaattcaacatgggtggcatctcctttggtgacccaagattctcccaccaccaatccaccaccaccctccgccacggcccggtggaggagatcaatggtcttatacgagtctacaaggacggtcgcgttgaccggtttccaattgtaagagaagttccaccaacgtatccctccgagcccggtgtgatcgccggagacgtgtcggtagaccaatccacgctcctttgggctcgtgtttacgtgccggttaggccctcatcgggagtcaaattgccggtgatggtgtacttccatggaggtggtttttgtgtcggttcggctgcttgggtttgctatcatgagttcttggccaaggtggcggctcgggtcgggtgcgttgtggtttcggttaactaccggttggcgccggagcaccggcttccggcggcttacgaggatggtgttagggcggttaaatgggtgagatatgtggttcgcggcggcgagtcgggttgttggtgggctaatggctgtgaactgtcgaggttgttcgtcagtggtgatagcgccggagcgaccatagcctacaacgtggcactacaactcccaacattcttcgccggtgtaattctactacaacccttcttcggaggagagaagaggactcaatccgagaaaaccctactccaaccaccgacctcggccctatctctccccgtgtcagacacctactggcgtctggccttgccggtcggagcaaatcgcgaccaccactactccaacccttcctcccgccctctcgagcatatccgactaccagcattcctcatgtgcatagcggagttggacatgttgggggaccgagaagtggaactctgccggacgttgagagtggcggggaaaagcgtcgaaattgcggtgcatgaaggagttgggcatgcatttcatgtgctccagagttcccgtttggcgaagaggaggacacaggagatggtgcagcagattaaggtgtttatgagctctagaacatgatatatgttcttgcgtaagtcatgttgtacgtaatcgtacgtgttgaagctttttgttacttcctttgtttctttgtctgtgcctttgttgttatgtaatatatatgtatggtggtcggtcgaagtcgatggacgagatccttgtggattgagttcaatatagattaagatttaattgtgttgaaggggggctatactaattaatggatgttaattggagatggtgtccaaaaaaaaaaaaaaaaaaaaaa

SEQ ID NO: 509 - protein, 333 aa, Triglochin maritima
MGGISFGDPRFSHHQSTTTLRHGPVEEINGLIRVYKDGRVDRFPIVREVPPTYPSEPGVIAGDVSVDQSTLLWARVYVPVRPSSGVKLPVMVYFHGGGFCVGSAAWVCYHEFLAKVAARVGCVVVSVNYRLAPEHRLPAAYEDGVRAVKWVRYVVRGGESGCWWANGCELSRLFVSGDSAGATIAYNVALQLPTFFAGVILLQPFFGGEKRTQSEKTLLQPPTSALSLPVSDTYWRLALPVGANRDHHYSNPSSRPLEHIRLPAFLMCIAELDMLGDREVELCRTLRVAGKSVEIAVHEGVGHAFHVLQSSRLAKRRTQEMVQQIKVFMSSRT

SEQ ID NO: 510 - protein, 328 aa, Arabidopsis halleri
MEAPPPSSDPYKFLNITLNSDGSLTRHREFPKLPPTEQSKDIPLNQTNNTFIRIFKPRNIPPESKLPILVYFHGGGFILYSAASAPFHESCTKMADRLQTIILSVEYRLAPEHRLPAAYEDAVEAVLWLRDQARGAINGGDCDTWLKDGVDFSRCFVMGSSSGGNIVYNVALRVVDTDLSPVKIQGLIMNQAFFGGVEPSDSESRLKDDKICPLPATHLLWSLCLPDGVDRDHVYSNPIKSSGPQEKEKMGRFPSTLINGYGGDPLVDRQRHVAEMLKARGVHVETRFDKDGFHACELFDGNKAKALYETVEAFMKSCSSTGPSPNYK

SEQ ID NO: 511 - protein, 327 aa, Arabidopsis lyrata
MEAPPPSSDPYKFLNITLNSDGSLTRHREFPKLPPTEQSKDIPLNQTNNTFIRIFKPRNIPPESKLPILVYFHGGGFILYSAASAPFHESCTKMADRLQTIILSVEYRLAPEHRLPAAYEDAVEAVLWLRDQARGAINGGDCDTWLKDGVDFSKCFVMGSSSGGNIVYNVALRVVDTDLTPVKIQGLIMNQAFFGGVEPSDSESRLKDDKICPLPATHLLWSLCLPDGVDRDHVYCNPIKSSGPNEKEKMGRFPSTLINGYGGDPLVDRQRHVAEMLKARGVHVETRFDKDGFHACELFDGNKAKALYETVEAFMKSCSSTGPSPNM

SEQ ID NO: 512 - protein, 345 aa, Arabidopsis thaliana
MAASDEVNLIESRTVVPLNTWVLISNFKVAYNILRRPDGTFNRHLAEYLDRKVTANANPVDGVFSFDVLIDRRINLLSRVYRPAYADQEQPPSILDLEKPVDGDIVPVILFFHGGSFAHSSANSAIYDTLCRRLVGLCKCVVVSVNYRRAPENPYPCAYDDGWIALNWVNSRSWLKSKKDSKVHIFLAGDSSGGNIAHNVALRAGESGIDVLGNILLNPMFGGNERTESEKSLDGKYFVTVRDRDWYWKAFLPEGEDREHPACNPFSPRGKSLEGVSFPKSLVVVAGLDLIRDWQLAYAEGLKKAGQEVKLMHLEKATVGFYLLPNNNHFHNVMDEISAFVNAEC

SEQ ID NO: 513 - protein, 358 aa, Arabidopsis thaliana
MAGGNEVNLNECKRIVPLNTWVLISNFKLAYKVLRRPDGSFNRDLAEFLDRKVPANSFPLDGVFSFDHVDSTTNLLTRIYQPASLLHQTRHGTLELTKPLSTTEIVPVLIFFHGGSFTHSSANSAIYDTFCRRLVTICGVVVVSVDYRRSPEHRYPCAYDDGWNALNWVKSRVWLQSGKDSNVYVYLAGDSSGGNIAHNVAVRATNEGVKVLGNILLHPMFGGQERTQSEKTLDGKYFVTIQDRDWYWRAYLPEGEDRDHPACNPFGPRGQSLKGVNFPKSLVVVAGLDLVQDWQLAYVDGLKKTGLEVNLLYLKQATIGFYFLPNNDHFHCLMEELNKFVHSIEDSQSKSSPVLLTP

SEQ ID NO: 514 - protein, 344 aa, Arabidopsis thaliana
MAGSEEVNLIESKTVVPLNTWVLISNFKLAYNLLRRPDGTFNRHLAEFLDRKVPANANPVNGVFSFDVIIDRQTNLLSRVYRPADAGTSPSITDLQNPVDGEIVPVIVFFHGGSFAHSSANSAIYDTLCRRLVGLCGAVVVSVNYRRAPENRYPCAYDDGWAVLKWVNSSSWLRSKKDSKVRIFLAGDSSGGNIVHNVAVRAVESRIDVLGNILLNPMFGGTERTESEKRLDGKYFVTVRDRDWYWRAFLPEGEDREHPACSPFGPRSKSLEGLSFPKSLVVVAGLDLIQDWQLKYAEGLKKAGQEVKLLYLEQATIGFYLLPNNNHFHTVMDEIAAFVNAECQ

SEQ ID NO: 515 - protein, 329 aa, Arabidopsis thaliana
MGSLGEEPQVAEDCMGLLQLLSNGTVLRSESIDLITQQIPFKNNQTVLFKDSIYHKPNNLHLRLYKPISASNRTALPVVVFFHGGGFCFGSRSWPHFHNFCLTLASSLNALVVSPDYRLAPEHRLPAAFEDAEAVLTWLWDQAVSDGVNHWFEDGTDVDFDRVFVVGDSSGGNIAHQLAVRFGSGSIELTPVRVRGYVLMGPFFGGEERTNSENGPSEALLSLDLLDKFWRLSLPNGATRDHHMANPFGPTSPTLESISLEPMLVIVGGSELLRDRAKEYAYKLKKMGGKRVDYIEFENKEHGFYSNYPSSEAAEQVLRIIGDFMNNLS

SEQ ID NO: 516 - protein, 336 aa, Arabidopsis thaliana
MGGTKLTHVTTTNPNNSNIHGPVVDEVEGLIKVYKDGHVERSQLLPCVDPSLPLELGVTCSDVVIDKLTNVWARLYVPMTTTKSSVSKLPLIVYFHGGGFCVGSASWLCYHEFLARLSARSRCLVMSVNYRLAPENPLPAAYEDGVNAILWLNKARNDNLWAKQCDFGRIFLAGDSAGGNIAQQVAARLASPEDLALKIEGTILIQPFYSGEERTESERRVGNDKTAVLTLASSDAWWRMSLPRGANREHPYCKPVKMIIKSSTVTRTLVCVAEMDLLMDSNMEMCDGNEDVIKRVLHKGVGHAFHILGKSQLAHTTTLEMLCQIDAFIHHYDPLN

SEQ ID NO: 517 - protein, 327 aa, Boechera stricta
MEAPPPSSDPFKFLNITLNSDGSLTRHGDFPKLPPTEQTKDIPLSQTNNTFIRIFKPRNIPPESKLPILVYFHGGGFILYSAASAPFHESCTKMADRLQIIIFSVEYRLSPEHRLPAAYDDAVEAILWLRDQARGAINGGDCDTWLKDGVDFSKCFVMGSSSGGNIVYNVALRVVDTDLSPVKIQGLIMNQAFFGGVEPSDSESRLKDDRICPLPATHLLWSLCLPDGVDRDHVYSNPIKSSGPQEKDKMRRFPSTLINGYGGDPLVDRQRHVADMLKACGVHVETRFDKDGFHACELFDGNKAKALYETVEAFIKSCSSTGPSSNM

SEQ ID NO: 518 - protein, 327 aa, Boechera stricta
MSEPTPISDPYAYLNIVKNPDGSITRDLTVFPCAAATPDPSPQNPVVSKDLPVNQSKSTWLRLYVPSSAVNDGVSSQKLPLVVYYHGGGFILCSVDFQSFHDFCSEMAHDLNAIVVSPSYRLAPENRLPAAYEDGTEALEWIKNSDDEWIKSHADLSNVFLMGTSAGGNLAYNVGIRSADSVSDVSPLQIRGLILHHPFFGGEERCGSEIRLVNDQVCPPIVTDVMWDLSLPIGVDRDHEYSNPTVGDGSENLEKIGRLRCKVMMIGGELDPMVDRQRDVAKLMKKKGVEVVELFTGGDVHGAEIADPSKRKTLLVSIGSFISSSAL

SEQ ID NO: 519 - protein, 317 aa, Boechera stricta
MESEIASEFLPFVRIYKNGRIERLVGNDIIPASLDPTNDVVSKDVVYSPEHNLSVRLFLPHKVTAVDQKLPLLIYIHGGAWIIESPFSPIYHNYLTAVTKSANCLAVSVQYRRAPEDPVPAMYEDVWSAIQWIFSHSNGSGGPVDWINKHADFGKVYLAGDSAGGNISHHMAMKAGKEKLDLKIKGIAVVHPAFWGTDPVDEYDMQDKEMRSGIAEVWEKVVSPNSVNGTDDPLFNVVGSGSDFSGLGCDKVLVAVAGKDVFVRQGLAYARKLDKCEWKGTVEVIEEEDEGHVFHLQKPNSAKALKFLNKFVEFISG

SEQ ID NO: 520 - protein, 332 aa, Brachypodium distachyon
MDPYKYLNIRYNPDGSLTRHNAARLLPPAPSGEPVAVPIAPDGEENRRIVHSNDAPLNPANGTSVRLFVPAGVVDNGNGNGNGRPIPLILYFHGGGYVLFRAASEPFHNTAAVLAATIPSAVASVDYRLAPEHRLPAAFDDAADAVRWVRSYAAGRPVFIMGCHNGASIAFRAALAAVDQGVELRGLILNQAHHSGVERTPAEEASVDDRVLPLPANDLLWELALPVGADRDHEYCNPGAMLAVVGASQLRRLPPCLVLGRKKDPPRDRQKVLVDALRDAGVDVEARMDGAGYHAMELFKADRAAEFVAQVTDFVRRHAVDDVQQAGARSRM

SEQ ID NO: 521 - protein, 362 aa, Brachypodium distachyon
MSTTHADATAAATDVVTDARAPPPSKSDSLFMQIVVHPDGTVTRPFVPTVPPSSDADEPAAVQSRDVPLDAALGTYLRLYLPPTVRASKKKLPVILYLHGGGFVLFTPATVFYHASCEAMAAAVPAIVASLHYRLAPDHRLPAAYHDAAAALLWLRQNSATDPWISAHADLESPRCFLMGSSSGANIAFHAALKSSPSAVVFPVSGVVMHQPYLGGETRTASEAASEGDAMLPLEASDKLWRLALPDGADRDHVYSNPAKSMAAEDLAGFPRCLVSGSVGDPLIDRQRAFAAWLRGSGAVEVVEKTDGKGFHAAELFVPEVAEELFAAVRDFVYGDGDQAAEMVVVGDDEPAPVSVGGAALT

SEQ ID NO: 522 - protein, 324 aa, Brassica rapa
MEAPPPSSDPYKFLNITLNSDGSLTRHRDFPKLPPTEHSKDIPLNPNNKTFIRLFKPRNIPPPETKLPILIYFHGGGFILYSAASAPFHESCTKMADRLQTMILSVEYRLSPEHRLPAAYDDGVDAISWLRDQARNGGDCDTWLSDVDFSRCFVMGSSSGGNIVYSVALRVAETDLSPVKIRGLIMNQAFFGGVEPSDSESRLKDDRICPLTATHLLWSLCLPHGVDRDHVYSNPIKSSGAEEREKMGRFPSTLINGYGGDPLVDRQRDVAEMLKARGVHVETRFDKDGFHACELFDENKAKALYDTVEGFIKSCSMTAPSSNM

SEQ ID NO: 523 - protein, 328 aa, Brassica rapa
MSEPTPISDPYAYLNIVKNPDGSITRDLTKFPCTPATPDPSPQTAVVSKDISINKSKSTWMRLYAPSSTLNDAVPSQKLPLVVYFHGGGFVLCSVDLQVFHGFCSDMARDLNAIVASPSYRLAPEHRLPAAYDDGAEALEWIRNSEDEWIKSRADLSNVFLMGTSAGGNLAYNVGMRSSAAASDLSPLQIRGMILHHPFFGGEERSGSEIRLANDQVCPPIVSDVFWDLSLPVGVDRDHEYSNPTVGEGSGGLEKIGGLRWKVMVVGGEEDPMVDRQRDVAKLMKRKGVEVVEVFNDGDVHGAEIGDPSKRKPLFASIGKFISSFAAL

SEQ ID NO: 524 - protein, 322 aa, Brassica rapa
MSEPSPVSDPYAHIGIVKNPDGSITRDPTRFPYASATPDPSPVNTVVSKDITVSHSNSTWMRLYVPVTALNDGVSSKKLPLVVYYHGGGFVICSVDFKRFHDFCNRMARELNAVVASPSYRLAPEHRLPAAYDDGVDALRFIRTSDDEWIKSHADLSNVFLMGTSAGGNLAYNVGLRSALADLSPVRIRGLVLHHPFFGGEERCESEIRLEHDQVFPPTAGDVCWELCLPVGANRDHEYSNLTVGDGPVNMEMIGRLGWKVVVSGGGGDPMIDRQRDVAKLMKEKGVDVVERFTDGVVHGAELGDPTKSTTLFASIRNLIYS

SEQ ID NO: 525 - protein, 296 aa, Brassica rapa
MSEPSEASDPCALIGIVKNPDVISKDIIVSDFTWMRLYLPTAALRLPKQKLSLVVYYHGGGFITGSVDFKLYDDFCNLMARVLNVVVASPSYRLAPEHRLPAAYHDGADALTFIRKSDDEWIKSHVYLFNVFLMGTGSGGNLAYSVGHRVANVLDPLLRICGLILHHPFFGGEERCESKIRHENDRVFPPAVGDLCWELCLPVGENRDHAYSNPTMGDGLEVLGALKWKVMVCGGGGDPMIDRQRDVAKLMKEKGIHVVECFTDGDVHGAELGDPSKSQTLFASIKSFISSTPYRF

SEQ ID NO: 526 - protein, 319 aa, Brassica rapa
MESDLVSEHPPFIRIYKDGRVERLTGTETIPTSLDKTNDVVSKDVQYSREHNLSVRLFLPHKATAGTNSKKLPLLIYIHGGAWIIESPFSPTYHNYVADVVKSANCLAVSIQYRRAPEHPVPASYEDSWSAVEWIFSHSDGSGPEDWINEHADFGRVFIGGDSAGANMTHHMAMRAGKEKLDPKIKGIAVVHPAFWGTDPVDEHDVQDREMRSGIAQLWEKVVSPNSVNGTDDPLFNVVGSDSDLSGLGCEKVLVAVAGKDVFVRQGLAYAAKLKKSGWKGDVEVVEEEEEGHVFHLQNPNSDNASKFFERFVKFITTP

SEQ ID NO: 527 - protein, 328 aa, Capsella grandiflora
MEAPPPSSDPYKFLNITLNSDGSLTRHRDFPKLPPTEQSKDVPLNQINNTFIRIFKPRNIPPDSKLPILVYFHGGGFILYSAASAPFHESCTKMADRLQTIILSVEYRLSPEHRLPAAYEDAVEAILWLRDQARDATNGGDCDTWLKDGVDFSKCFVMGSSSGGNIVYNVALRVVDTDLSPVKIQGLIMNQAFFGGVEPSDSESRLKDDKICPLPATHLLWSLCLPDGVDRDHVYSNPIKSSGPQEKDKMGRFPSTLINGYGGDPLVDRQRHVADMLKARGVHVETRFDEDGFHACELFDASKAKALYETVEAFIKQSCSSTGPSANM

SEQ ID NO: 528 - protein, 328 aa, Capsella grandiflora
MSEQKTPSADPYAYLNMVRNPDGSVTRLLNNLPCAAATPDPSPQNPAVSKDVPVNQSKSTWLRLYVPSSAVIDGVYSKKLPVVVYYHGGGFVICSVDLQFFHDFCSEMARELNAVVVSPSYRLAPEHRLPAAYEDGTEALEWIKNSDDEWIKSYADLSNVYLMGTSAGGNLAYNVGLRSVDSVSELSPLQIRGFILHHSFFGAKERCESEIKLANDQVCPPAVTDVMWDLCLPIGVDRDHEYSNPTVGDGSENLEKFGRLGWKVMSIGGELDPMIDRQRDVAKLMRKKGVDVAEQYTDGAVHGAEIKDPSKRKTMFVSIASFISSSAQ

SEQ ID NO: 529 - protein, 375 aa, Capsella grandiflora
MLRRITCSSSSLASQTLFFRLFRQIPRSYTSPTTIAFSGRNFSRLSTPTTLRCICSHSSSEIISEHPPFIRVYKDGRIERLAGTETVPASLNPQNDVVSKDVVYSPERNLSARLFLPHKSTQLSAGNKLPLLIYFHGGAWIIESPFSPIYHNFLTEVVKSANCLAVSVQYRRAPEDPVPAAYEDAWSAIQWIASHSNGSGQEDWINKYADFDRVYLAGDSAGGNISHHMAMRAGKEKLKPRIKGTVIVHPAFWGKDPVDEHDVQDREIRSGVAEVWEKIASPNSVDGVNDPWFNVVGSGSDFSGMGCDKVLVAVAGKDVFVRQGLAYAGKLKKSGWQGTVEVMEEEGEDHCFHLLNPSSENTPKFMKKFVEFISG

SEQ ID NO: 530 - protein, 328 aa, Capsella rubella
MEAPPPSSDPYKFLNITLNSDGSLTRHRDFPKLPPTEQSKDVPLNQTNNTFIRIFKPRNIPPDSKLPILVYFHGGGFILYSAASAPFHESCTKMADRLQTIILSVEYRLSPEHRLPAAYEDAVEAILWLRDQARGATNGGDCDTWLKDGVDFSKCFVMGSSSGGNVVYNVALRVVDTDLSPVKIQGLIMNQAFFGGVEPSDSELRLKDDKICPLPATHLLWSLCLPDGVDRDHVYSNPIKSSGPQEKDKMGRFPSTLINGYGGDPLVDRQRHVADMLKARGVHVETRFDEDGFHACELFDASKAKALYETVEAFIKKSCSSTGPSANM

SEQ ID NO: 531 - protein, 375 aa, Capsella rubella
MLRRIACSSSSLASQTLFFRLFRQIPRSYTSPTTIAFSGRNFSRLSTPTTLRCICSHSSSEIISEHPPFIRVYKDGRIERLAGTETVPASLNPQNDVVSKDVVYSPERNLSARLFLPHKTTQLSASSKLPLLIYFHGGAWIIESPFSPIYHNFLTEVVKSANCLAVSVQYRRAPEDPVPAAYEDAWSAIQWIASHSNGSGQEDWINKYADFDRVYLAGDSAGGNISHHMAMRAGKENLKPRIKGTVIVHPAFWGKDPVDEQDVQDREIRSGVAEVWEKIASPNSVDGVNDPWFNVVGSGSDFSGMGCDKVLVAVAGKDVFVRQGLAYAGKLKKSGWQGTVEVMEEEGEDHCFHLLNPSSENTPKFMKKFVEFISG

SEQ ID NO: 532 - protein, 321 aa, Capsella rubella
MESEIVSEFLPFVRIYKDGTIKRLIGNDIIPTSLDPSNDVVSKDVVYSPEHNLSVRLFLPHKAAAAADGEKKLPLLIYIHGGAWIIESPFSPIYHNYVAAVAKSANCLAVSVQYRRAPEHPVPAAYEDVWSAIQWTFSHANGSGGPEDWINKHADFGRVFLAGDSAGGNISHHLAMKAGEEKKLGIKIKGIGVVHPAFWGTDPVDEFDVQDKETRSGIAEVWEKVASPNSVNGTDDPLFNVNGSGSDFTGLGCEKVLVAVAGKDVFARQALAYAAKLEKSQWGGTVEVVEEKDEGHVFHLQKPDSDKALKFLNKLVDFISG

SEQ ID NO: 533 - protein, 342 aa, Carica papaya
MADNTPIAPSDSSIPNEFLKITLNPDGSFNRYNHTPNVQPSDSDSTLLTLSKDIPLNHANNTFIRLFMPKNIPPNTKLPLIIFFHGGGFVLFSVASLPYHESCIQMAAQISALILSVEYRLAPEHRLPAAYDDAVDSVMWVRNQAMDIDGCDSWLRDHADFSKCFLMGSSAGGNMVYHAALRAVDVDLSPLQIAGLILNQPYFGGVERTESEMRFVNDRILPLPANDLLWSLALPDGADRDHEYSNPMACEGGSCGEKIGRLQRCLVTGYGGDPLLDRQKEAVKMLESRGVHVETRFDHDGFHAVELFDPVRARGLYERFKEFIRAACGSCNVSGVKAQSAI

SEQ ID NO: 534 - protein, 321 aa, Carica papaya
MSQAQIDPYDHLNIVLNTDGTCNRLFDVPSVAANPNPAQGEPAASKDVIISPVTDVTARIFRPTNLPSNDNAIARLPIIIHFHNSGGWTLYDATTAINHMTCAQTASELTVILVSVNYRLAPENRLPAQFDDAIDAITWVKDQALAPDGEPWLKEYGDFSRCYLFGSSNGANIAFNAALRTLDCDLNPMKISGCIFYQPMFGGKNRTRNEIANINDPLMPLAVQDLLWELALPPGVDRDHRYCNPLIEGPHTKKMASLGRCLIVGYGGDSMVDRQQAFVKMLVALGVRVDARFDDAGFHGIEAIDPRRAARLLNLTREFII

SEQ ID NO: 535 - protein, 319 aa, Eutrema salsugineum
MESEIASEHLPFIRIYKDGRVERLSGTEIIPPSLDAATNDVVSKDVVYSPEHNLSVRIFLPHKSTAGENKKKLPLLIYIHGGAWIIESPFSPIYHNFLTEIVKSGNFLAVSVQYRRAPENPIPAAYDDSWSAVKWVFSHSDGSGPEDWVNEFADFGKVFIAGDSAGGNMSHHMAIRAGKEKLEPRIKGIAIVHPAFWGRDPVDEKDVQDREMRNGIAEVWEKIASPNSVDGTDDPLFNVVGSGSDFSELACEKVLVAVAGKDVFVRQGLGYAAKLEKSGWVGDVEVVVEEDEGHVFHLQNPNSKNAEKFLKKLVGFIIG

SEQ ID NO: 536 - protein, 319 aa, Glycine max; identical to SEQ ID NO: 78

SEQ ID NO: 537 - protein, 342 aa, Glycine max
MTGSNEVNLSESKSVVPLNTWVLISNFKLAYNLLRRADGTFNRELAEFLDRKVPANAIPVDGVFSFDHVERSTGLFNRVYQLAPENMGRFIELEKPLSTTEIVPVIIFFHGGSFSHSSANSAIYDTFCRRLVNNCKAVVVSVNYRRSPEYRYPCAYDDGWAALNWVKSRTWLQSGKDSKVHVYLAGDSSGGNIAHHVAVRAAEEDIEVLGNILLHPLFGGEKRTESETKLDGKYFVRLQDRDWYWRAFLPEGTDRDHPACNPFGPKGKNLEGLKFPKSLVCVAGLDLLQDWQVEYVEGLKNCGQDVNLLYLKEATIGFYFLPNNDHFYTLMEEIKNFVNPNC

SEQ ID NO: 538 - protein, 346 aa, Glycine max
MAGSNQVNLNESRSVVPLNTWVLISNFKLSYKLLRRDDGTFNRELAEYLDRKVPANAIPVEGVFSIDHVDRNAGLFYRVYLPTSGNEAQWGIRDLEKPLSTTEIVPVIVFFHGGSFSHSSANSHIYDTFCRRLVRICKAAVVSVNYRRSPEHRYPCAYDDGWAALRWVKSRAWLQSGREAKVHVYLAGDSSGGNIVHHVAVRAAEEEIEVLGNILLHPLFGGEKRTESELRLDGKYFVRLKDRDWYWRAFLPEGENRDHPACNPFGPRGRSIEGLKFPKSLVCVAGLDLLQDWQLAYAKGLEDCGQQVKLLFLKEATIGFYFLPNNDHFYCLMKEINNFVNSDSDC

SEQ ID NO: 539 - protein, 337 aa, Glycine max
MASETPKPKPVLPWKTRVSISFLSTLTDYARRSNGTVNRRLMNFLDRKSQPNAKPVNGVSTQDVTVDAKRNLWFRIFNPAAASGGGLPVVIFFHGGGFAFLSPDSFAYDAVCRRFCRRVPAVVVSVNYRLAPEHRYPLQYDDGEDILRFLDENRAVLPENADVSKCFLAGDSAGANLAHNVAVRVAKSGPLREVRVVGLVSIQPWFGGEARTAAEVKFEGAPLVSTARTDWLWKAFLPDGSDRDHGASNVSGPNSEDLSGLNYPDTLVFVGGFDPLQDWQKKYCEWLKKSGKKAQLIEYSTMIHAFYIFPELPESSQLISEVKDFITKRISDLKSNM

SEQ ID NO: 540 - protein, 327 aa, Glycine max
MPPSTKPNLPWKLRILTSLLNLLINASRRSNGTVNRRLFNFFDRKLPSSPNPVDGVKTSDVTVDATRNLWFRLFAPSSSVATTLPVVIFFHGGGFAFLSPASAAYDAVCRFFCRSFNAVIISVNYRLAPEHRYPSQNDDGFDVIKYLDENGAVLGDINNCFLVGDSSGGNIAHHVAVRVCKEKFRFVRVIGLVSIEPFFGGEERTESEIRMTQDPLVSLEKTDWYWKSFLPSGLGRDHEAVNVSGPNAVNISGLGYPNTLVVIAGFDPLQDWQRRYYEWLRKSGIEAQKIEYPNMIHGFHLFPDLPDSSVFASDVKDFITKQIADVN

SEQ ID NO: 541 - protein, 343 aa, Glycine max
MTESNNEVNLSESKSVVPLNTWVLISNFKLAYNLLRRADGTFNRELAEFLDRKVPANTIPVDGVFSFDHVERSTGLFNRVYQVAPENMGRFIELEKPLSTTKIVPVIIFFHGGSFSHSSANSAIYDIFCRRLVSNCKAVVVSVNYRRSPEYRYPCAYDDGWSALNWVKSRTWLQSGKDSKVHVYLAGDSSGGNIAHHVAVRAAEEDIEVLGNILLHPLFGGEKRTESEMKLDGKYFVRLQDRDWYWRAFLPEGADRDHPACNPFGPKGKNLQGLKLPKSLVCVAGLDLLQDWQLEYVEGLKNCGQDVKLLYLKEATIGFYFLPNNDHFYTLMEEIKNFVNPNC

SEQ ID NO: 542 - protein, 344 aa, Glycine max
MAGSNELNPNDSKMVVPLNMWVLISNFKLAYNLLRRPDGTFNRDLAEFLDRKVPANANPVDRVFSFDVVVDRETNLLTRIYRPTEGEERSVNILDLEKPVSSEVVPVIIFFHGGSFAHSSANSAIYDTLCRRLVGICKAVVVSVNYRRAPENRYPCAYDDGWTALKWVSSRSWLQSKKDKKVHIYLAGDSSGGNIVHHVALKAVESGIEVFGNILLNPLFGGQERTESEKRLDGRYFVRVKDRDWYWRAFLPEGEDRDHHACNPFGPKGKSLEGITFPKSLVVVAGLDLVQDWQLGYAKGLEKAGQEVKLIFLEQATIGFYLLPNNEHFSPVMDEIKYFVSSDC

SEQ ID NO: 543 - protein, 338 aa, Glycine max
MASETPKAKAVLPWTTRVSISFLSTLTDFSRRSNGTVNRRLMNFLDRKTQANAKPVKGVSTKDVTVDAKRNLWFRIYNPTAADADDGLPVFIFFHGGAFAFLSPDSFAYDAVCRRFCRRIPAVVVSVNYRLAPEHRYPSQYDDGEDILRFLDENRAVLPDNADLSKCFLAGDSAGANLAHNVAVRIGKSGLQLIRVVGLVSIQPWFGGEERTAAEVKLDGAPLVSMARTDWLWKAFLPEGSDRDHGAANVSGPNSEDLSGLYYPDTLLFVGGFDPLQDWQKKYYEWLKKSGKNAQLIEYPSSIHAFYIFPELPESSQLISQVKDFVTKKISDFQSNVY

SEQ ID NO: 544 - protein, 338 aa, Glycine max
MASTTSNSQQPKPVLPWRARISISFLCTLSDAARRSNGTVNRLLINLLDLKSHPNAAPVNGVSSNDVTVDASRNLWCRVFSPTVAAASGGALPVVIFFHGGGFAFLSPDSLAYDAVCRRFCRQIPAVVVSVNYRLTPEHRYPSQYDDGEDILKFLDENRAVLPENADLSKCFLAGDSAGANLAHNVAVRVPKSGLRIIRVVGLVSIQPWFGGEERTAAEEKFKGAPLVSMARTDWLWKVFLPDGSDRDHVAANVSGPNSEDLSGLDYPDTLVVVGGFDPLQDWQRRYYEWLKNSGKNVQLIEYPKMIHAFYVFDDLPESSQLITQIKDFINKRISELN

SEQ ID NO: 545 - protein, 331 aa, Glycine max
MASELTKLILPWKVRLLISLLSTLADTSRRSNATINRRLFNLADRQSLPNPTPVDGVSSSDVTVDPARNLWFRLFVPSSSSATTLPVFVYFHGGAFAFFSAASTPYDAVCRLYCRSLNAVVISVNYRLAPEHRYPSQYDDGFDVLKFIDRNGSVLPDVADVTKCFLAGDSAGANLAHHVAVRVSKEKLQRTNIIGLVSVQPYFGGEERTKSEIQLNRAPIISVDRTDWHWKVFLPNGSDRDHEAVNVSGPNAVDISGLDYPNTIVFMGGFDPLRDWQRKYYEWLRESGKEVELVDYPNTFHAFYFFSELPETSLFVYDVKEFMAKQMANVN

SEQ ID NO: 546 - protein, 331 aa, Glycine max
MVVPLNMWVLISNFKLAYNLLRRPDGTFNRDLAEFLDRKVPANANPVDGVFSFDVIVDRETNLLTRIYRLAEGEERSVNILDLEKPVNSEVVPVIIFFHGGSFAHSSANSAIYDTLCRRLVGICKAVVVSVNYRRAPENRYPCAYDDGWTALKWVSSASWLQSRKDKKVHIYMAGDSSGGNIVHHVALKAMESGIEVFGNILLNPLFGGQERTESEKRLDGRYFVGVKDRDWYWRAFLPEGEDRDHHACNPFGPKGKSLEGITFPKSLVVVAGLDLVQDWQLGYAKGLEKAGQEVKLLFLEQATVGFYLLPNNEHFSPVMDEIKYFVGSDC

SEQ ID NO: 547 - protein, 220 aa, Glycine max
  misc_feature (220)..(220): Xaa can be any naturally occurring amino acid
MGLLTLLSDGTVLRSNINFQEQPQPTQHDNLVQFKDFLFHKKFNLHLRLYKPKFDDNINNDDDKNNNNKSLPVVMFLHGGGFCFGSRVWPHIHSCCVRLATSLHAAVVTPDYRLAPEHRLPAAVDDGVEALRWLQRQGHHGGDEWVTRGVDFDRAFILGDSSGGNIAHHLAVQLGPGSREMDPVRVRGYVLLGPFFSGVVRTRSEVGPPEQMLTLELLDX

SEQ ID NO: 548 - protein, 324 aa, Glycine max
MGSLPHVVEDCMGFLQLYSDGSIFRSNDIEFKVSPIQDNSITYKDYLFDKRFNLSLRFYKPQHVAPIDNNKKLPIVMFLHGGGFCFGSRTWPHIHNCCMRLASGLQAVVVSPDYRLAPEHRLPAAVDDAVEAVRWLQRQGLSLKEDAWLSGGVDFDCVFVVGDSSGGNIAHHLAVRLGSGSREMDPVRVRGYVLFAPFFGGEVRTKSEEGPPEHMLNLELLDRFWRLSMPVGESRDHPLANPFGPGSPNLEQVKLDPILVIVGGNELLKDRAKNYATRLKKLDKDIKYVEFEGCEHGFFTHDSFSSEVTEEVIQILKGFMLANF

SEQ ID NO: 549 - protein, 329 aa, Glycine max
MSEISNSKATVVEDCRGVLHVYNDGSIVRSSRPSFNVPINDDGTVLWKDVVFDTALDLQLRLYKPADDSAGSKLPIFIYIHGGGFCIGSRTWPNCQNYCFQLTSRLRAVVVAPDYRLAPENRLPDAIEDGFEALKWLQTQAVSDEPDPWLSHVADFSHVYISGDSAGGNIAHHLAARLGFGSPELDPVRVRGYVLLAPFFGGTIRTKSEAEGPKDAFLNLELIDRFWRLSIPIGETTDHPLVNPFGPYSQSLEAIDFDPILVVAGGSDLLKDRAEDYAKRLKEWGNKDIEYVEFEGQQHGFFTIYPNSEPSNKLMLIIKQFIEKHLGKV

SEQ ID NO: 550 - protein, 305 aa, Glycine max
MSEISNSKATVVEDCRGVLHVYNDGSIVRSSRPSFNVPINDDGTVLWKDVVFDTALDLQLRLYKPADDSAGSKLPIFIYIHGGGFCIGSRTWPNCQNYCFQLTSRLRAVVVAPDYRLAPENRLPDAIEDGFEALKWLQTQAVSDEPDPWLSHVADFSHVYISGDSAGGNIAHHLAARLGFGSPELDPVRVRGYVLLAPFFGGTIRTKSEAEGPKDAFLNLELIDSQSLEAIDFDPILVVAGGSDLLKDRAEDYAKRLKEWGNKDIEYVEFEGQQHGFFTIYPNSEPSNKLMLIIKQFIEKHLGKV

SEQ ID NO: 551 - protein, 333 aa, Glycine max
MAFPPHVVEDCMGLLKLLSDGTVLRSNINFQEQPQPTQHDNLVQFKDFVFLKKFNLHLRFYKPKFEDNDDDDNENNNKKLLPVVMFLHGGGFCFGSRAWPHMHSCCVRLATSLRAAVVAPDYRLAPEHRLPAAVDDGVEAVRWLQRQKGHHGGDEWVTRGVDFDRVFILGDSSGGNIAHHLAVQLGPGSREMDPVRVRGYVLLGPFFGGVVRTRSEVGPPEQMLTLELLDSRFWRLSIPIGETRDHPLANPFGPNSPNLGHVKLDPILVIVGGNELLKDRAADYATRLREQGKNIEYVEFEGKEHGFLTHDSHSEAAEELVQIIKRFMLENSN

SEQ ID NO: 552 - protein, 307 aa, Glycine max
RSSRPSFNVPVIDDASVLWKDVVFAPAHDLQLRLYKPADSTGSKLPVFFYFHGGGFCIGSRTWPNCQNYCFQLTSRLRAVVIAPDYRLAPENRLPSAIEDSLLAVKWLQTQALSNEPDPWLSYVADFSRVFISGDSAGGNIAHHLAARLGFGSPELTPVRVKGYVLLAPFFGGTIRTKLEAEGPKDAFLNLELIDRFWRLSVPVGETTDHPVVNPFGPYSESLEAINFDPILVVAGGSDLLKDRAEDYARRLKEWGSLFKDMTENCARRLKEWGKDVEYVEFEGQQHGFFTNDPNSELSNKLMLVVK

SEQ ID NO: 553 - protein, 324 aa, Glycine max
MGSLPHVVEDCMGFLQLYSDGSIFRSNGIEFKVSPIQDNSITYKDYLFDKRFNLSLRFYKPQQQHIALSNKKVPIVIFLHGGGFCFGSRTWPHIHNCCMRLASGLQAAVVSPDYRLAPEHRLPAAVDDAVEAVRWLQRQGLSLREDAWLSGGVDFDRVFVVGDSSGGNIAHHLAVRLGSGSREMDPVRVRGYVLFAPFFGGEVRTKSEEGPPEHMLSLELLDRFWRLSMPVGKSRDHPLANPFGPGSPNLEQEKLDPILVIVGGNELLKDRAKNYATRLKELDKDIKYVEFEGCEHGFFTHDSFSSEVAEEVIQILKRFMLANF

SEQ ID NO: 554 - protein, 343 aa, Glycine max
MAAISLRHNPQANNTNQQREIITEEIQGLIRVHRDGRVERPSIVPSVSSTVASERGVTAKDVMINKETNLWARVYVPISACHYSKLLPLLVYFHGGGFCVGSAAWSCYHEFLTNLASKANCVILSVDYHLAPENRLPMAYDDGCNALMWVKREALNGSCVQKWWLSHCNMSSLFLAGDSAGANIAYNVATRMHMGSTSNTPLLSLKGVILIQPFFGGEERTFSEKHSLQPPNSALTLSVSDTYWRLALPLGATRDHSYCNLLADGSVKLRDLRLPSTMVCVAEMDILRDRNLEFSNALAKAGKRVETVVYKGVGHAFHVLHNYQLSHSRTQDMISHIRNFLNQ

SEQ ID NO: 555 - protein, 309 aa, Glycine max
HGSVVEEIQGLIRVHKDGYVERPQVVPCVTASTMSPELNVTSRDMVIDSVTNIWARFYVPISQHKKMPLLVFFHGGGFCVGSAAWSCYHDFLARLSTKVGCVIMSVNYRLAPENPLPAPYDDGLKAIMWLHQQHNNKGSGTEWWTSKCNFSSVFLGGDSAGANIAYNVATRLCACDGAALTLRPMNLKGLILIQPFFGGEVRTDSEKGMAQSPGSALNLAASDSYWRLALPCGAKRDHPWCNPFGEVGGMDILKDRNLEFCDALVRAGKRVEYGVFRGVGHAFQILSKSQVAKSRTKEMMARVKSFMAL

SEQ ID NO: 556 - protein, 291 aa, Glycine max
  misc_feature (291)..(291): Xaa can be any naturally occurring amino acid
LIAEAPNFLKLYSDGSVKRFDPEIVPASLESTKGYKSKDVIIDSSKPITGRIFLPDYPTSSKKLPLLVYFHGGGFCIGSTTWLGYHNFLGDFSVTSQSIILSVDYRLAPEHRLPIAYEDCYTSLEWLGDQVSCEPLLQQIDLTRVFLSGDSAGGNIAHHVAVKAIQNNECPLKIKGLMLIHPYFGSEKRTKNEMADESIKDVAMNDMFWRLSIPEGLNRDYFGCNFEKTDLSTSVWSKFPAIGVYVAGKDFLKERGVRYAEFLKKKGVKEVELVEAKEETHVFHVYYPESX

SEQ ID NO: 557 - protein, 340 aa, Glycine max
MAAISLRHNPQVNNTNQQREIIAEEIQGLIRVHRDGRVERPPIVPSVSCTVPSERGVTAKDVMINKETNLWARVYMPISCHHSKLLLPLLVYFHGGGFCVGSAAWSCYHEFLTNLASKANCVILSVDYHLAPENRLPMAYDDGSNALMWVKREALNGFSVQKWWLSHCNMSSLFLAGDSAGANIAYNVATRMGSTSNTPLSLKGVILIQPFFGGEDITFSEKHSLQPPNSALTLSVSDTYWRLALPLGATLDHPYCNPLAHGTVKLRDLRLPSTMVCVSEMDILRDRNLEFSNALAKAGKRVETVVYKGVGHAFQVLHNYQLSHSRTQEMMSHVSNFLNK

SEQ ID NO: 558 - protein, 320 aa, Glycine max
EEIQGLIRVHKHGYVERPQVVPCVTASSKMSPELNVTSRDMAIDSATNTWARFYVPISQHKKMPFLVYFHGGGFCVGSAAWSCYHDFLARLSAKVECVIMSVNYRLAPENPLPAPYDDGLKAIMWVKQQMLHQQHNKGGSEWWTSKCNFSSVFLGGDSAGANIAYNVATRLCACDGAALRPLNLKGLILIQPFFGGEVRTGSEKCMAQSPGSALNLAASDTYWRLALPCGANRDHPWCNPLVKVKLEELKLMRTLVCISEMDILKDRNLEFCDALVRAGKRVEYGVFRGVGHAFQILSKSQVSKSRAKEMMARVKSFMAL

SEQ ID NO: 559 - protein, 347 aa, Gossypium raimondii
MEDQSSTSAPSIDPFKLLKIVQNPDGSLTRQSLFPSVSITEEESTGSNASQLAFFKDIPLNPQNKTFFRLYRPPTPPPNTNHRLPLLIHFHGGGFILFSATSRPFHDACSVKAVKLPAVVLSLEYRLAPEHRLPAAYDDAVETIMWVRDQAMDVNGCDPWLKEYVDFSKCFLIGSSAGGNMVFHAALRALDIDTSPVKIIGLIMNQPYFSGVERTESEKRFVNDRILPLPANDLMWSLALPEGADRDHEFCNPMTADGFLKEKMGRLTRCLVTGHGGDPLIDKQRELVKVLEARGVDVVAEFAEGGCHGIEIFDPLKAEALLKSIKEFVDTCCRCVNYESAAAKSTL

SEQ ID NO: 560 - protein, 341 aa, Gossypium raimondii
MSDQTKTVPSSNPTVVDDPYKRLEITRNPNGSLTRNPNRFPNTSATPDPDPTVPVLSKDVTINQTTHTWARVFLPRQKPLDTNKFPLIVYYHAGGFIHCSAASTIFHVFCSNMALELQAIVVSVDYRLAPEHRLPAAYDDAIEALLWIKTTQEEWLTQYANFTTCFVMGSSSGANIAYHAGIRVAEEADGLRPWKIRGLILHQPFFGGSVKVESELRLVNDPVLPPGVGDLMWELALPIGADRDHEYCNPTTTKGTNLTEKLAAVGWKVLVTGCDGDPLIDRQVELVKSMEEKGVKVVSHFRMGDHHGVDFMQPDKANALFLVLKDFIASATSVTINANVE

SEQ ID NO: 561 - protein, 354 aa, Oryza sativa
MAGSDEVNRNECKTVVPLHTWVLISNFKLSYNILRRADGTFERDLGEYLDRRVPANARPLEGVSSFDHIIDQSVGLEVRIYRAAAEGDAEEGAAAVTRPILEFLTDAPAAEPFPVIIFFHGGSFVHSSASSTIYDSLCRRFVKLSKGVVVSVNYRRAPEHRYPCAYDDGWTALKWVMSQPFMRSGGDAQARVFLSGDSSGGNIAHHVAVRAADEGVKVCGNILLNAMFGGTERTESERRLDGKYFVTLQDRDWYWKAYLPEDADRDHPACNPFGPNGRRLGGLPFAKSLIIVSGLDLTCDRQLAYADALREDGHHVKVVQCENATVGFYLLPNTVHYHEVMEEISDFLNANLYY

SEQ ID NO: 562 - protein, 360 aa, Oryza sativa
MADAHGHRRRVALPCAVRLRLCLLEAAIDATQRRDGAINRPLFSLYDRRAPADPRPDAAGVSSTDVTVDASRGLWARVFTPTAPEHEHSSSSSTTTPRPVIVYFHGGGFAMFSAASRPFDTHCRTLCAGVGAVVVSVDYRLAPEHRFPAAYDDGEAVLRYLATTGLRDEHGVPVDLSACFLAGDSAGGNIAHHVAQRWTTTSAATPPPPSDNPVHLAGVILLEPYFGGEERTKAERALEGVAPVVNIRRSDRWWRAFLPEGADRNHPAAHVTGDAGPEPELQEAFPPAMVVVGGLDPLQDWDRRYAGMLRRKGKAVRVVEFPEAIHAFYFFPEFAGDIRKLVGEIRAFVEDSIMSKQSIA

SEQ ID NO: 563 - protein, 338 aa, Oryza sativa
MAAMAAAAVPSDRPPLPWRARLLVGAVSVLHSASLRRDGTVNRFLLSLFDRVVPPNPAPDAAGVASSDHAVSDDLRVRMFFPGAAARDGGGDHLPVVVYFHGGGFVFHSVASAQFDALCRRFASAIPAVVASVDFRLAPEHGFPAPYDDGKAALRWVLAGAGGALPSPPATVFVAGDSAGGNVAHHVVARTPSSVSGLIALQPFFAGETPTASEQRLRDAPFGSPERISWLWRAFLPPGATRDHEAANVPAALRRDAERRRAFPPTMVCVGGWDAHQDRQRDYADALRAAGGAEEVVVAEFPDAIHAFYIFDDLADSKRLLTEVTAFVNRRRAAAAAS

SEQ ID NO: 564 - protein, 351 aa, Oryza sativa
MQREMPADADMTRRRRSPSLPCAVRVQAAGFALGHRRDGSVRRLVFSLLDIHVRAKRRAGVRSVDVTIDASRGLWARVFSPPPTKGEAAQALPVVVFFHGGGFVLFSAASCYYDRLCRRICRELRAVVVSVNYRLAGPARRFPAAYDDGLAALRYLDANGLAEAAGVAAVDLSSCFLAGDSAGGNMVHHVAQRWAAASAASPSSSTTLRLAGAVLIQPFFGGEERTEEELELDKAALTLSLARTDYYWREFLPEGATRDHPAAHVCGGGEHDVEVAEAFPAAMVAIGGFDLLKGWQARYVEALRGKGKAVRVVEYPGAIHGFCLFPELADSGEFVEEMKLFVQEHRTKRVQ

SEQ ID NO: 565 - protein, 346 aa, Oryza sativa
MAGAHGRRRRVALPWPVRLRLCVFEAAIDATQRRDGSVNRFLFSLFDRRAPADPRPDAAGVSSTDITVDASRGLWARVFYSPSPSPRPVVVYFHGGGFTLFSAASRAYDALCRTLCAVVVSVDYRLAPEHRAPAAYDDGEAVLRYLGATGLPDHVGPVDVSTCFVVGDSAGGNIAHHVAQRWTATATTTTTTTDNPVVHLAGVILIQPCFSGEERTESERALDGVAPVLNTRRSDLSWKAFLPEGADRNHPAAHVVTGDDDDDAELHEAFPPAMVVVGGLDPLQDWDRRYAAMLRRKGKAARVVEFPEAIHSFYFFPEFLADDHRKLVGEIRAFVEECITSKQPTA

SEQ ID NO: 566 - protein, 367 aa, Oryza sativa
MSSDDTTPTPLGRRTKPKPPMSRLMRLSLKAVDWATDATRRADGTLNRLALSVLDPRVPAFSSPCRGVASRDVLVHPPTRLRARLFYPSAAAGKDERPPPPRPLPVIVFFHGGGFAFLSAASAAYDAACRRIARYASAAVLSVDYRRAPEHRCPAAYDDGIAALRYLDDPKNHHGGGGGGVPPLDAARCYLGGDSAGGNIAHHVARRYACDAAAFENVRVAGLVAIQPFFGGEERTDSELRLDGAPIVTVSRTDWMWRAFLPDGCDRTHEAANFAAPSAAPGVDSPAFPPVLLAIGGYDPLQDWQRRYAEMLRGKGKDVRVFEYPNAIHAFYVFPAFDDGRDLMIRIAEFVAESAAAAAAASGGGSE

SEQ ID NO: 567 - protein, 364 aa, Oryza sativa
MTWPTRLFVLAVGCGADATCRVDGIISCRLLDLLDPPVPPSAAPREGVATRDVVVDPAIPLRARLFYPCRPTGGEAGGGGGEAGATKPLPVVVFFHGGGFAFLSAASRAYDAACRRIARYAGAAVLSVDYRRSPEHRYPTPYDDGLAALRFLDDPNNHPLAADDGDVPPLDVARRFVAGDSAGANIAHHVARRYALAAHTFANLRLAGLIAIQPFFGGEERTPAELRLVGAPIVSVPRTDWLWRAFLPPGADRTHEAAHAASPAGAAGIDSPAFPPATVVIGGYDPLQDWQRRYCETLRGKGKAVRVLDYPTPSTPSTSSRSSTSRSTSCSGLRTSSPPAAAAAAASTDLSASRCTRTSSCGWG

SEQ ID NO: 568 - protein, 351 aa, Oryza sativa
MEKPTKKGVAPPMAWRTRLSILAAGCLTDATCRADGTINRRLLNFLDPHVPPSAAPRNGVASRDVVVDPAIPLRARLFYPCPSGGDGGTGDATKPLPVVVFFHGGGFAYLSAASRAYDAACRRIARYAGAAVLSVDYRRSPEHRYPTPYDDGLAALRFLDDPNNHPLAADDGDVPPLDVTRCFVAGDSAGANIAHHVARRYALASTTFANLRLAGLIAIQPFFGGEERTPAELRLVGAPIVSVPRTDWLWRAFLPPGADRTHEAAHAASPAGAAGIDSPAFPPATVVIGGYDPLQDWQRRYCETLRGKGKAVRVLDYPDAIHAFYIFPEFAEARDLMLRIKDIVAGGGGEH

SEQ ID NO: 569 - protein, 361 aa, Oryza sativa
MNLDISLSRFVTPIDLVSSSAKSGSGDAAPPPHVVEDFFGVIQLLSDGSVVRADDAALLAMPELQDVPGVQWKDAVYDATHGLRVRVFKLAAAAAGDDGGKLPVLVYFHGGGYCIGALDQSPFHTFCLRAADELPAVVLSVQYRLAPEHRLPTAIDDGAAFFSWLRGAGSADPWLAESAELARTFISGVSAGANLAHHVAVRVASGRQPVVDDVDPVVRVAGYVLLDAFFGGVERTAAEANPPADVSLLTVEMADQFWRLALPAGATRDHPVANPFGPESPSLEAVALPPALVVASGGDVLYDRVVGYAARLKEMGKAVELVEFEGAQHGFSVIQPWSPETSEVIQVLKRFVHKAIRPAEG

SEQ ID NO: 570 - protein, 314 aa, Oryza sativa
MSGSGDNAAPHVVEDFYGVVKLLSDGSVVRGDESVLIPSWKDVVYDATHGLRVRVYTSRTAAAAAAGDDGGKLPVLVYFHGGGYCIGALDQSICHGFCLRAAYELPAVVLSVQYRLAPEHRLPAAIDDGAAFISWLRGQAALGAGADPWLAESADFARTFISGLSAGANLAHHVTARVASGQLAAVDPARFAGYVLVDPFLAGVERTAAEANPPADVSTLTVEMADQMWRMSLPVGATRDHPVANPFGPESPSLEAVALPAALVVASGGDVLYDRVVDYAARLKEMGKAVELAEFEGEQLGFSAAKPSSPAIKE

SEQ ID NO: 571 - protein, 337 aa, Oryza sativa
MSGHAAPAPHVVEDYRGVIQLLSDGTVVRSDAGSGAGALLPPEDFPDVPGVQWKDLVYDATHGLKLRVYRPPTAGDAERLPVLVCFHGGGYCLGTFEKPSFHCCCQRLASELRAVVLSADYRLGPEHRLPAAIDDGAAVLSWLRDQAMSGPGADSWLAESADFARVFVAGESAGGNMSHHVAVLIGSGQLTVDPLRVAGYMLLTPFFGGVERAPSEAEPPAGAFFTPDMSDKLWRLSLPEGATRDHPVANPFGPDSPSLAAVAFPPVLVVVAGRDILHDRTVHYAARLKEMEKPVELVTFEEEKHLFLSLQPWSEPANELIRVMKRFIHKDEGSNNF

SEQ ID NO: 572 - protein, 360 aa, Oryza sativa
MSQTELPESTSPSESSPAMASTTPAPYVVEDCGPNLQLFSDGTVIRFEDYNILPPPVLPPALSTVQWKDVVYDAGRGLKLRVYRPPAATVAGEKLPVLVYFHGGGYFIGSFEMDNFHACCLRLAHELPAVVLSADYRLAPEHRLPAAHDDAATAMSWVRDQAVASGDAADPWLAESADFGRVFVSGDSAGAGIVHHVALRLGSGQIAVDPARVAGCALLFPYFGGEERTRSEAEYPPGPFLTLPFSDQGWRLALPRGATRDHPLANPFGPESPAMDAVALPPLLVVVAQLDLLRDRDVDYAARLRAMGKQVEMVEFEGQHHGFFAVEPLGDAGSELVRVVRRFVYGNGGDAAAAAAAASK

SEQ ID NO: 573 - protein, 327 aa, Oryza sativa
MAPAAEPYVVEDCRGAVQLMSDGTVRRSAEPAFHVDLPDDADAAVEWKDVTYDAEHDLNARLYRPRHLGAANDARVPVVAYFHGGGFCIGSGRWPNFHAWCLRLAAELPAVVLSFDYRLAPEHRLPAAQEDGATAMAWVRDSAARDPWLADAADFSRVFVAGDSAGGNITHHMAVRFGKAGLGPQVRLRGHVLLMPAMAGETRTRAELECRPGAFLTAEMSDRYARLILPGGATRDYPVLNPAGPEAPGLEAVAMAPSLVVAAEHDILRDRNEHYARRMREEWGKEVAFVEFAGEQHGFFEVDPWSERADELVRLIRSFVVEHMDSE

SEQ ID NO: 574 - protein, 328 aa, Oryza sativa
MASLSDPNSPPPHVVEDCRGALQLLSDGTVVRAAAPPPPFYVRLDIDDGRVEWKDVVYDAAHGLGVRMYRPAATGGAEEKLPVVVYFHGGGFCIGSCTWPNFHAGCLRLAAELPAVVLSFDYRLAPEHRLPAAHEDAAAALIWLRDQLLSDPWLADAADARKVFVSGESAGGNFAHHLAVRFGAAGLDPVRVAGYVLLMPAFISERPTPSELAAPATAFLTRDMCDRYCRLALPAGADKDHPLVNPFGPASRSLEAVDVGRVLVVAADGDLLRDKNVEYAERMKAMGKDVELVVFAGEEHAFFGVKPMSAATGELVEVIRRFIAGAAA

SEQ ID NO: 575 - protein, 335 aa, Oryza sativa
MSSSSSSPAPPHVVEDCLGIVQLLSDGTVTRSGDYSSISLMRDVPIDLPVQWKDVVYDAGRGLRLRMYAPANHGGEEGKLPVLVYFHGGGFCIASFELPNFHAGALRLAGELPAVVLSADYRLAPEHRLPAAYEDAVAVLSWLRGQAAAAADPWLAASADFERVFVCGDSCGGNIAHHLTVGCGSGDIALDAARLAGCVMLWPYFGGEERMPSEAPPPPPEGDASPSAMGITLFDQMWRLALPAGATRDHPAANPFGPESPPLDGVAFPPVLIVDPELDVLRDRVADYAARLQAMGKRVELVKFEGQGHGFFVLDPMSEASGELVRVVRRFVHAG

SEQ ID NO: 576 - protein, 351 aa, Oryza sativa
MPTMPAVVSAAGAAAPCSNVVEDLVGFLRVLSDGTILRSPGPVFCPSTFPDEHPSVEWKEAVYDKPKNLHVRMYKPSPASGGVGAGGGGKLPVLVYFHGGGFCLGSCTWANVHSFCLRLAADAGAVVLSAGYRLAPEHRLPAAVDDAAGFLHWLRERAVDGDGDGDGWWLAEAADFGRVFVTGDSAGGTIAHHLAVRAGSAAAAAPDDPVAIRGYVLLMPFFGGVSRTPSEAGCPAEVFLNLDLFDRFWRLSLPPGATRDHPMANPFGPDSPAMDGVELPPVLVVAGGLDMLRDRAVDYAERLSAMGKPVELAEFAGEHHGFFTLGPGSDAAGELIAAVARFVDVAAPPPK

SEQ ID NO: 577 - protein, 330 aa, Oryza sativa
MAAERVVVDECRGVLFVYSDGAVERRAAPGFATPVRDDGSVEWKDAVFDAARGLGVRLYRPRERGGGRLPVFFYYHGGGFCIGSRTWPNCQNYCLRLAAELGAVVVAPDYRLAPEHRLPAAFEDAENALLWLASQARPGGDTWVAEAADFGRVFVSGDSAGGTIAHHLAVRFGSASGRAELAPARVAGYVQLMPFFGGVERTPSEAACPDDAFLNRDLNDRYWRLSLPAGGATADHPFSNPFGPASPDLAAAEFAPTLVVVGGRDLLRDRALDYAARLAAMGKPVEALEFEGQQHGFFTIDPWSAASGDLMHAVKLFVDTDGGGGARLDG

SEQ ID NO: 578 - protein, 367 aa, Oryza sativa
MRRRRMGALHVGEPRVSFQQQQQQQVGKNGQQGHGHGAVVEEIHGLIKVYRDGFVERIPAIPDVPCTWGTTASVPGVVIARDAVVDRATRVWARLYAPAAAAAAGRVPVVVYFHGGGFCVGSAAWSCYHEFLAKLAARAGCAVMSVDYRLAPENRLPAAFDDGVTAVRWLRQQAAISSAADELSWWRGRCRFDRVFLAGDSAGATIAFHVAARLGHGQLGALTPLDVKGAILIQPFFGGETRTASEKTMPQPPGSALTLSTSDTYWRMSLPAGATRDHPWCNPVTGRGAPRLDSLPLPDFLVCISEQDILRDRNLELCSALRRADHSVEQATYGGVGHAFQVLNNYHLSQPRTQEMLAHIKAFVRAR

SEQ ID NO: 579 - protein, 345 aa, Sorghum bicolor
MAAPDPPPRPGKPPLPWRARLLVGAASTLHAASLRRDGTVNRFLLSLFDRTAALTPTAPVGGVASTDHAVSDHLHTRIFVPEIPGGGGKELPVVVYFHGGGFVFHSAASAQFDELCRRLASAIPAVIASVDYRLAPEHRFPAQYDDGEAALRWVLAGAGGALPSPPAAAVFVAGDSAGGNVAHHVAARLPDAVAGLVAVQPFFSGEAPTESELRLRDAPFGGPERLAWLWRAFLPPGATRDHEAANVPAAIRRDAGAGDDRWRTFPPTLVCVGGWDVHQDRQRAYADALRAAGAEEVTVAEYPDAIHAFYILDDLADSKKFVGDVAEFVNRHTSQRKKRALDHAD

SEQ ID NO: 580 - protein, 370 aa, Sorghum bicolor
MAASSSSNTPLRRRRTRTPSLPWTVRIQAAALEVAHRLDGSIRRPLFWLGDLKVKVGASHAQPRSDVLLVRSADITIDASRGLWARVFCPSAAVIADADDDAAPLPIFVYFHGVLFSASSRPYDAFCRRLCRELRAVVVSVNYRLAPEHRFPAAYDDGVAALRYLDETTPIPLPLPPDLLHGAVDLSSCFLVGDSSGANMVHHVAQRWASSMSSATTATSTLPPPPPLRLRLAGAVLIQPFFGGEERTEAELAFDKACRILSVARADHYWREFLPEGATRDHPAARVCGEGVELADTFPPAMVVSGGFDLLKDWHARYVETLRAKGKLVRVVEYPDAVHGFYAFPELADSGKLVEDMKLFVHDHMSGGFD

SEQ ID NO: 581 - protein, 368 aa, Sorghum bicolor
MASAASEMEGEGAGAGTGTGEGAPIAPRRPALPLKVRFQLMCLDVVGGLSMRRDGTINRSLFSLFDRRARASARPDGLGVRSADVHVDASRGLWARVFSPSEAAGSPLPVVVYFHGGAFALLSAASVPYDAMCRRFCRELGAVVVSVDYRLAPEHRCPAAYDDGVDVLRHLASTGLPDGVAVPVDLSRCFLAGDSAGANIAHHVAQRWTTAGVASSSSSPPRSCPVRLAGVVLVQPYLGGEERTDAEVMLDGKVPVVTVRGSDWMWRAFLPEGADRNHPAAHVTDENADLADGFPPAMVVIGGLDPLQDWQRRYADVLRRKGKAVRVVEFQEAIHTFFFFPELPDCARLVEAMKAFIDDSNASSVSAA

SEQ ID NO: 582 - protein, 356 aa, Sorghum bicolor
MASDSSSNQAGAAAKPKPKPPPLPLSVRLQLTGLTVAIDAVERRDGTVNRCLYGVIDRLLSARANPKPDASGVRSLDFTMDASRGMWARVFAPATADRPLPVVVYYHGGGFALFSPAIGPFNGVCRRLCAALDAVVVSVNYRLAPEHRWPAAYDDGVDALRFLDARGGVPGLDDDVPVDLGSCFLAGESAGGNIVHHVANRWAAAWQPSARTLRVAGVFPVQPYFGGVERTPSELALEGVAPVVNLRRSDFSWTAFLPVGATRDHPAAHVTDDNADLAEQFPPAMVIIGDFDPLMDWQRRYADVLRRKGKEVVVAEYPGMFHGFYGFPELPEATKVLQDMKAFVDSHRATPKLADA

SEQ ID NO: 583 - protein, 357 aa, Sorghum bicolor
MGEAAADPAPAAAKGRVAPPMSWRTRLSVLAAGYLTDATRRADGTVNRRLLAVLDKPVAASATPRNGVASRDVTIDPALPLRARLFYPCAPAPADAAEAAAVPVVVFFHGGGFAYLSAASLAYDAACRRIARYAGAAVLSVDYRRSPEHRFPAAYDDGYAALRFLDGPDPDHPGALAVAPPIDAARCFVAGDSAGGNIAHHVARRYALDPSAFASLRLAGLIAIQPFFGGEERTPAELRLVGAPIVSVPRTDWMWRAFLPHGADRDHEASSPEAATAGIDLDAAGSFPPATVVVGGYDPLQDWQRRYCDALRGKGKEVRVLEYPDAIHAFYVFPEFAESKDLMLRIKEIVAGSSSSE

SEQ ID NO: 584 - protein, 350 aa, Sorghum bicolor
MAEAPTTPPRKPKPPMSRLMRLSLKFVDRLTDATRRADGTLNRCALSLLDPRVPAISSPCRGVASRDVVLDGARRLRARLFHPATTTAKSTSPFPVIVFFHGGGFAYLSAASAAYDAACRRMARYASAAVLSVDYRRAPEHRFPAPYDDGVAALRFLDDPKNHPSTTTTIPLDVSRCFVAGDSAGGNIAHHVARRYACDAATFRNVRVAGLIAIQPFFGGEERTPSELRLDGAAPIVSIDRTDWMWRAFLPPGCDRTHEAANFASPAAAAGLDSPAFPPVLLAIGGFDPLQDWQRRYGEMLKSMGKDVRVAEYPDAIHAFYVFPGFDDARDFMIRVAEFVAECAGGGSSD

SEQ ID NO: 585 - protein, 355 aa, Sorghum bicolor
MAGSDEVNRNECKGAVPIHTWVLISNFKLAYNMLRRADGTFDRDLAEFLDRRVPPDARAQEGVSSFDHVIDTSTGLEVRIYRAAAAAANNNGGAAAVTLPILDFLAGAPSPDPFPVILFFHGGSFAHSSSGTAIYDNLCRRFVKLSKGVVVSVNYRRAPEHRYPCAYDDGWTALKWAMSQPFLRSGRGGDARPRVFLSGDSSGGNIAHHVAVRAADAGINICGNILLNAMFGGTERTESERRLDGKYFVTLQDRDWYWKAYLPEDADRDHPACNPFGPNGRRLRGLPFTKSLIIVSGLDLTCDRQLAYAEGLQEDGHHAKLVYREKATVGFYLLPNTDHYHEVMEEIADFLRANL

SEQ ID NO: 586 - protein, 323 aa, Sorghum bicolor
MLRRADGTFDRDLAEFLDRRVPPDARAQEGVSSFDHVIDTSTGLEVRIYRAAAAAANNNGGAAAVTLPILDFLAGAPSPDPFPVILFFHGGSFAHSSSGTAIYDNLCRRFVKLSKGVVVSVNYRRAPEHRYPCAYDDGWTALKWAMSQPFLRSGRGGDARPRVFLSGDSSGGNIAHHVAVRAADAGINICGNILLNAMFGGTERTESERRLDGKYFVTLQDRDWYWKAYLPEDADRDHPACNPFGPNGRRLRGLPFTKSLIIVSGLDLTCDRQLAYAEGLQEDGHHAKLVYREKATVGFYLLPNTDHYHEVMEEIADFLRANL

SEQ ID NO: 587 - protein, 332 aa, Sorghum bicolor
MSSSSPPHVVEDMPHVLQLLSDGTVVRFADYDTLPPPSVPPALPVQWKDVVYDATHDLKLRVYRPPPDSCGNNKLPVLVYFHGGGYVLGTFALPNFHACCLRLAAELPAVVLSADYRLAPEHRLPAALDDAASVMDWVRAQAVDAAGGDPWLAESADLRRVFVTGDSAGGNIVHHVAVRLASASGELSPGLDPVRVAGHVMLCPFFGGAERTASEAEFPPGPFLTLPWYDQAWRLALPPGATRDHPFANPFGPESPALGGVALPPTLVVAAERDLLRDRQADYVARLKATEQPVEHVEFEGQHHGFFAVEPAGDAGSEVVRLVRRFVYGNSY

SEQ ID NO: 588 - protein, 331 aa, Sorghum bicolor
MPSSAPEPHVVEDCRGVLQLMSDGTVRRSAVPALPVDVPDDEDCGVEWKDVTWDRQHDLNARLYRPGHLGAANDARIPVVAYFHGGGFCIGSGRWPNYHAWCLRLCSELPAVVLSFDYRLAPEHRLPAAQEDGARAMAWLTRSAATDPWLADAADFARAFVAGDSAGGNIAHHVAAELGKGGGRRLAPAVRIRGALLLAPAFAGEARTRAELECPRDAFLTTEMFDRYARLALPDGADRDDPVLSPAGPRAPALEAVEMAPVLVVAGGRDVLRDRNKQYARRMKEEWGKEVEYVEIAGADHGFFQVDPWSERADEVVRVVRRFVVEHMDSE

SEQ ID NO: 589 - protein, 368 aa, Sorghum bicolor
MSSTTSPAPGVSSEVPPPHIVEDCLGLVQLLSDGTVKRAPATLVLHDNAPAAVRWKDVVYNEARNLSLRMYVPSAAGAGDGGGAETKKLPVLVYFHGGGFIIGSFASPEFHAVCLRLAAELPAVVLSADYRLAPEHRLPAAVEDADALLSWLADQQRHAAAGAGADPWLADAADLSRVFVSGDSAGANIAHHAAAGVASGRRLGLAGCVLLWPYFGGERRTASEAACPGDGVFLTLPLYDQMWRLALPAGATRDHQAANPFAGPEATGGGSGSPGAELPPLLVAVGDGDMLVDRVREYVAWARARVQAAATGNKNNDRRVDLVEFPGAGHGFAIFEPDGEAAGELVRVVRRFVHGGDDDDAAQAPRSG

SEQ ID NO: 590 - protein, 337 aa, Sorghum bicolor
MSSSPTPAAGTAAAPHVVEDCLGFVQLLSDGTVRRSTDYSMLRPTGRVPSDSDLPVQWKDVVYDDAHGLRLRMYRPTNAGATKKKLPVLVYFHGGGFCLLSFEMTSFHAAALRLAAELPALVLSADYRLAPEHRLPAALDDAESVFSWLRAQAMADPWLAGSADFARVFVTGHSAGGNISHHVAVRLAGCVMLWPYFGGEEPTPSEAACPADQVMGPALFDQMWRLALPAGATKDHPFANPFAPGSVQLGDLGAAFPPVLVVDPDQDPLHDRVVDYVARLKAAGKDVELVVFAGQGQGHGFFATEPCGEAADELIQVIRRFVHGRLSDCQSRVDGSN

SEQ ID NO: 591 - protein, 367 aa, Sorghum bicolor
MPTMPAAVSAATGVSPPAAANVVVVEDIYGFLRVLSDGTILRSPEQPVFCPATFPSSHPSVQWKEEVYDKANNLRVRMYKPLSTAAGGGGEAGKKLPVLVHFHGGGFCLGSCTWANVHAYCLRLAAEAGAVVLSAGYRLAPEHRLPTAVDDGVGFLRWLRAQSTMDAAAAADGWLTEAADFGRVFVTGDSAGGNIAHHLAVRAGLSDTKRGEVDLDLDLRPVTVRGYVLLMPFFGGVRRTPSEAECPAEVLLNLDLFDRFWRLSLPAGGTRDHPAANPFGPDSPELGSVDFRAPVLVVVGGLDMMRDRAVDYAERLAAMGKPVELVEFAGKPHGFYLHEPGSEATGELIGLVSRFLHSCACDRGAVA

SEQ ID NO: 592 - protein, 350 aa, Sorghum bicolor
MPAVSAAACCAAAAPATEVAEDLFGFLRVLSDGTVLRSPAGPVFCPTTFPGSHPSVQWKEAVYDKAKNLRVRMYKPTTTASAAAGKKLPVLVHFHGGGFCLGSCTWANVHEFCLRLAADAGAVVLSAGYRLAPEHRLPAAFDDGAGFMRWLRDQSVAAADGWLAEAAADFGRVFVTGDSAGGTIAHHLAVRAAAEPEPEPGHVTVRGYVLLMPFFGGVRRTASEAECPEEAFPNLDLVDRFWRLSLPAGATRDHPAANPFGPDSPDLGSVDFPPVLVVVGGLDLIRDRTVDYAERLAAMGKPVEVAKFAGKPHGFYLHEPGSEATGELIQTVARFVDGCGAVVAASEAAA

SEQ ID NO: 593 - protein, 369 aa, Sorghum bicolor
MHVNKGMPTMPAGVSVAAAGCCPTATPANEVVEDIFGLVRVLSDGTVVRSPAGPVFCPTTFPENHPSVEWKEAVYGKANNLLVRMYKPSASPAGGKKAPVLVHFHGGGFCIGSCTWGNVHAFCLRLAADTGAVVLSAGYRLAPEHRLPAAVDDGAAFMRWLREQSSSSSDAWLTEAADFGRVFVTGDSAGATIAHHLAVRAGVGVATDDAGEAAGEADQVTIRGYVLLLPFFGGVERTPSEQAECPAGAGSVLSLDVLDRFWRVSLPAGATRDHPVANPFGPDSPELGSVDFRPVLVVVAGLDLLRDRAVGYAGRLAAVGKPVELVEFAGAAHGFFLHEPGSEATGELIRAVRRFVDSCVVSASEAAAA

SEQ ID NO: 594 - protein, 327 aa, Sorghum bicolor
MASEAEPRVVDECRGVLFVYSDGSVVRRAQPGFSTPVRDDGTVEWKDVTFDDAHGLGLRLYLPRERAAGGRRLPVFFYYHGGGFCIGSRTWPNVQNYCLRLASDLGALVVAPDYRLAPEHRLPAALDDAAAAVLWLAAQAKEGDPWVAEAADLGRVFVSGDSAGGTIAHHLAVRFGSPAARAELAPVAVRGYVQLMPFFGGVERTRSEAECPDDAFLNRPLNDRYWRLSLPEGATADHPVSNPFGPGAPALDAVEFAPTMVVVGGRDILHDRAVDYADRLKAAGKPVEVRDFDGQQHGFFTIDPWSDASAELMRVVKRFVDSDGRFD

SEQ ID NO: 595 - protein, 339 aa, Sorghum bicolor
MSSSSPVSAVSATAPHVVDDCLGIVQLLSDGTVTRSADYSALPLQGEVPSNLPVQWKDVVYDAAHALRLRMYRPTHGDTTTTTANDKLPVLVYFHGGGFCLCSFELPHFHAGALRLAAELPALVLSADYRLAPEHRLPAAHRDAEAVLSWLRAQAEADPWLADSADLGRVFVCGDSAGGNIAHHVAVRYGRGQLALDHNPVVRLAGCVLLWPYFAAEERTASETAGLDGHQFVSTKLLEQMWRMALPVGATRDHTAANPFGPDSDPLDDVAFPPVLVVDPDLDVLHDRIQDYAARLTAMAKPVELVVFRGKDHGFFTFDPCGEASDQLIHVIRGFVHGG

SEQ ID NO: 596 - protein, 266 aa, Sorghum bicolor
MYFHSGGFCLGTFSQPNFHSGCLRLASELPAVVVSADYRLGPEHRLPAAIDDAAAALSWLRDQHATAVGVAGAHHHHRWLAESADFTRVFVAGESSGANMSHHVAVRHGSGELPLAPLRVAGHVLLTPFFSGVHRTAAEASPSPPPAAVSPPSFTTEMADTMWRLSLPVGATRDHPVTNPFGPGSPALGAVAFPRVLVVSAGRDILHERVLRYAARLQEMEKPVEVVVLEEQEHAFFSRQPWSHGTSEMIRVVPRFVYGENCAECK

SEQ ID NO: 597 - protein, 340 aa, Sorghum bicolor
MSGDAAPHVVEDFFGAVQLLSDGTVVRGDEALLMPAEPFPDVPGVEWKDAVYDTARGLKVRLYRPAAADAGDGGSNIKLPVLVHFHGGGYCIGSYNQLGGGDHLRRRLAADLPALVLSVQYRLAPEHRLPAAIEDGATFLSWLRGQASLAAAGGVGAGAEAEPWLAESADFARTFLSGVSAGANLTHHLAVRAGSGQVDLAPVRLAGHVLLSLFLGGVQRTATESDPPDGVSLTVAMSDQLWRMALPVGASLDHPLANPFGPDSPGLENVALPPVLVEAPEVDVLRDRVLLYAARLREMGKDVELAEFEGEQHGFSVRRWGQANEELIRILKRFVHRCST

SEQ ID NO: 598 - protein, 347 aa, Sorghum bicolor
MSGITTTAPHVVVEDLLGIVQLLSDGSVVRADESVVTPPGAAFPDVPGVHWRDVVYDPARRLKVRLYRTSPAEAPAAAPKSGRRLPVLVYFHGGGYCIGAYDQPGFHAFCRHVAAEVPAVVLSVQYRLAPEHRLPAAIDDAATFFFWLRAQAAPAPAAAAAAADPWLAESADFSRTFVSGVSAGSNLAHHVVVQIASGQIVPGAVRVAGYFLFSPFFGSDERVASESHPPAGVSVTVQMLDVAWRMALPLGATRDHPLANPFGPDSPSLQPLPLPPVLLEAPGRDVLYDHVLRYAARLKEMGKAVELVEFAEERHGFSVGQWSEATEELMHILKQFINGGAAAAVLK

SEQ ID NO: 599 - protein, 442 aa, Sorghum bicolor
MSSDATPHVVEDFFGVVRLLGDGSVVRGDESVLMPAGPFPDIPGVEWKDVAYDTARGLKVRVYRSSSVARGRLPVLVYFHGGGYCIGAYDKPMFHSCCQRFAAELPAVVLSVQYRLAPEHRLPAAIDDGATFFSWLRRQAAAGTEPWLEESADFAQTFVSGVSAGANLAHHVVVHIASGKLAVHPARIAGYVLLSAFFGSAERTAAESESPANVSLTAAFDQIWRLVLPAGATRDHPLANPFARDSPGMEPLPLPPALVVVPGLDTLRDHMRRYAARLEEMGKAVELVEFAGERHGFSVRAWSEANEELVRILKRFVNQVKSLVERAAKPRVRFSNRRCRDRSRWSGHQAFMLVVGDAEPLPAAAVAGKCWAICGLVGMKAIPSPTAPFCGWMLSTNSVKNDAGAVISLFQMLGLPCVADPSRSAAHVSCARRDLQGSICNS

SEQ ID NO: 600 - protein, 372 aa, Sorghum bicolor
MRRRRMGALHVVGEPRVVSFQQQPAAVVAKNGHGPVVEEIHGLIRVYKDGHVERLPAIPTVPCTWGGTGADAPGGVVARDVVVDPATGVWARLYAPMTTTTSAGGGTGGSRPPVVVYFHGGGFCVGSAAWSCYHEFLAQLSARAGCAVMSVDYRLAPEHRLPAAFDDGLAAVRWLRHQASRAAACDDLSWWRARCGFDRVFLMGDSAGASIAFHVAARLGQGHLGALSPLTVRGAVLIQPFFGGEARTVSEKSMAQPPRSALTLATSDCYWRLALPAGASSRDHPWCNPLSRAAPRLETVPLPPVLVCVSETDILRDRNLELCRAMRKAGKCVEQAMYGGVGHAFQVLHNCHLSQPRTQEMLAHIKAFVSAR

SEQ ID NO: 601 - protein, 315 aa, Thellungiella halophila
MEAPPPSSDPFKFLNISLNSDGSLTRHRDFPKLPPTEQSKDIPLNPNNKTFIRIFKPRNISRETKLPILIYFHGGGFILYGAASAPFHESCSKMADRLQTLILSVDYRLAPEHRLPAAYNDAVEAVLWLRDQARGAINGGDCDTWLKDGVDFSKCFVMALRVVDTDLSPVKIQGLIMNQAFFGGVEPSDSELRLKDDRICPLTATHLLWSLCLPDGVDRDHVYSNPIKSSGPQEKDKMGRFPSTLINGYGGDPLVDRQKHVAEMLKARGVHVETRFDEDGFHACELFDANKAKALYDTVEAFMKSCSFTAPPSNM

SEQ ID NO: 602 - protein, 324 aa, Thellungiella halophila
MSRVSRPAFDPYKHLNISINPDGSCTRHFVFPMVNPDPDPSPGKLTASKDVTINHETGVTVRIFRPTNIPSNDNAVARLPIILHLHGSGWILYPATSPANNRGCSQMASELTVIIVSVNYRLAPEHRLPAQYDDALDALLWVKQQAVDPTNGEPWLRDYADFSRCYICGSSNGANIGFQLALRSLDHDLTPLKIDGCVFYQPFFGGKTRTKSELVNFADPLMPVPAIDALWELTLPEGVDRDHRYCNPMGYLPQKEKVGRLGRCLVIGYGGDTAVDWQQEFVTLLVKSGVRVEARFDDAGFHAIELVDPRRAVALLNMIRDFIN

SEQ ID NO: 603 - protein, 375 aa, Theobroma cacao
MLSISTTNVSSTIFSAPIQAIISFDLHLKPMTDQSSTAPSSMDPYKFLKIVQNPDGSLTRLAQFPSVSVTEGTTDSNTSQLSPFKDIPLNPNNETFIRVYRPPTDPPPSTNDKLPLIIAFHGGGFVLFSATSRPFHEACSIKAAKLPAVVISLEYRLAPEHRLPAAYDDAMETIMWVRDQAVDTNGCDPWLKEYVDFSKCFLMGGSAGGNMVYHAGLRALNVGISPVKIMGLIMNQPYFSGVERTESEKRSINDRILPLPANDLMWSLALPKGTDRDHEYCNPMAADGSHKEKIGRLPRCLVTGHGGDPLVDKQRELVKMLEARGVEVVAEFAEGGCHGIEIFDPLKAQALLKSIKEFVNASCQIVNVATAKSTL

SEQ ID NO: 604 - protein, 360 aa, Theobroma cacao
MQPAKARALFLVLKEFILSASATVPGDGETLRPPITDPFEYLQIVLNPDGTLTRNLMIPRVVAEPNDPEGQAPVLSKDVPINPSNRTWARIFLPRQALDCTSSSANKLKLPLVVYYHGGGFVLLSADMGICHDFCSNMSKAIPAIVVSVDYRLAPENRLPAAYDDGLEALHWIKTTGDEWLREYADLSNCFLMGSSAGGNIAYHVGLRAAEVVHELEPLKIKGLVLHQPFFGGTQRIASELRLMNDPVLPPIVSDVMWDLSLPIGVDRDHEYCNPTADGGSKELEKIKSLGWKVLVYGSDGDPLIDRQIELLKLVEGKGVQVVRNVRVGGFHGEEEMDVSKAHAMHMVVKDFIMSSKQVA

SEQ ID NO: 605 - protein, 331 aa, Theobroma cacao
MSTQTIPSSSISDPFKRLQITLNPDGTLTRLNIFGRTPAKPESSDNSTAVLCRDIPINYSNNTWARIFLPKQALDHSSTSAKKLPLLVHFHGGGFILFSPDENMSHEFCSNMASELSVIVVSASYRLAPEHRLPAAYDDAMEALSWIKTSHDNWLENYADFSQIFLMGGSAGGNIAYHLGLRAAEQVDSLSPLKIQGLILHQPFFGGVERTESEFRSINDPIFSPCDSDLMWELSLPIGANRDHEFCNPTVAHGSTALEKIKRLGWRVFVTGCDGDQLIDRQIELVKMIKKKEIRVVSRFVEGGFHGFELADPSKAKALYVALKNFIFSSI

SEQ ID NO: 606 - protein, 274 aa, Vitis vinifera
MDAYKSLGLVPNPDGSLTRSSPFPSVPATDETTAATDTAVAFSKDVPLNPANNTFLRIYRPSLLPPNTKLPYADFSKCFLMGGSAGANIVFHAGVRALDADLGAMKIQGLVLNQPYFGGVERTESELRLADDRIVPLPANDLLWALALPNGADRDHEYSNPMAGGSQSHQEKIGRLQKCLVRGYGGDPLVDRQRRFAEMMEARGVHVVAKFNDGGHHGVEIFDPSQAEALYNDVKNFIYSTASKSTMGEESRWVSLTVADGVFHMVSSIHYLIT

SEQ ID NO: 607 - protein, 234 aa, Vitis vinifera
MQQSHYLHRKIIDFNRIAAKTGQVFNLKNCDRNSTLGRSIDPRTRSCSLLSPLLMKPPPPTPPWLFPKMCLSTPPTTPFSASSGLAAAEIDGGLILNQPYFGGVERTESELRLADDRIVPLPANDLLWALALPDGADRDHEYSNPLSGGSYQEKIGRLQNCLVIGYSGDPLIDRQRRVVKMMETRGVHVVAKFKDGGHHGIECYDPSHAEAMDDDDFISWILHAMKDFLACHIL

SEQ ID NO: 608 - protein, 346 aa, Zea mays
MAEAPTTPPRKAKPPMSRLMRLSIKVVDRVTDATRRADGTLNRFALSLLDPRVPAISSPCRGVASRDVILDGALRLRARLFHPATTSKSTAPLPVIVFFHGGGFAYLSAASPAYDAACRRIARYASAAVLSVDYRRAPEHRFPAPYDDGIAALRFLDDPKNHGHPTPLDVSRCFVAGDSAGGNIAHHVARRYASDVASFRNIRVAGLIAIQPFFGGEERTASELRLDGAAPIVSIDRTDWMWRAFLPPGCDRTHEGANFASPAAAAGLDSQAFPPVLLVIGGFDPLQDWQRRYGEMLKSMGKDVRVVEYPDAIHAFYVFPGFDDARDFMIRIAKFVAESASGGSSS

SEQ ID NO: 609 - protein, 353 aa, Zea mays
MGEAADPATGRVAPPMSWRTRLSVLAAGYLTDATCRADGTVNRRLLGMLDKGVAASAAPRNGVASRDVTIDPAVPLRARLFYPCAPAAAEDDDAEAERPAVPVVVFFHGGGFAYLSAASPAYDAACRRIARYAGAAVLSVDYRRSPEHRFPAAYDDGFAALRFLDGGPGPDPDPGAIAGAPPIDAARCFLAGDSAGGNIAHHVARRYALDPSAFTNLRLAGLIAIQPFFGGQERTPAELRLVGAPIVSVPRTDWMWRAFLPHGADRTHEASSPDVATAGIDGAPDFPPATVVIGGYDPLQDWQRRYCDALRGKGKEVRVLEYPDAIHAFYVFPEFAESKDLMLRIKEIVASSE

SEQ ID NO: 610 - protein, 401 aa, Zea mays
MRCEVTQQESGDSPQARRNGSLSRPASPMRGSLGDKRCDGGSGGPRAWETKTSDYKRPSMTRTRHLLHCHCPYHHSSAACLHEIPRDRTGRSMAASDQPPRPEKPPLPWRARLLVGAASALHAASLRRDGTVNRFLLSLFDRAAPPTPTAPLGGVASTDHAVSDHLRARLFVPETPGGGNELPVVVYFHGGGFVFHSAASAIPAVIASVDYRLAPEHRFPAPYDDGEAALRWALAGAAGALPYPPDAVAGLLAVQPFFSGEAPTGSEMRLRDAPFGSPERLAWLWRAFLPPGATRDHEAANVPAAIRRDAGAGADRWRAFPPTLVCVGGWDVHQDRQRAYADALRAVCSEEVTVAEYPDAIHAFYVLDDLADSKKFVGDVAEFVNRHAQQRKKPALDHAKD

SEQ ID NO: 611 - protein, 362 aa, Zea mays
MGSSSSKNASHMSSLPWTVRIQAAAFQVAQRQDGSIRRPILFLSDLKTGASRATPSPDVSEVRSTDITIDVSRGLWARVFCPTAIADDAPAPLPVFVYFHGGGFMLFSASFGPYDTFCRRLCRKLRAVVVSVNYRLAPEHRFPAAYDDGVATLRYLDETPTPLPADLVPAPVDFGSCFLIGDSSGGNMVHHVAQRWASMSSATSSQSQSQPPLRMRRLRLAGAVLIQPFFGGEERTEAEVRHDKACRILSVARADLYWREFLPEGASRDHPAARVCGEGVELADTFPPAMVVTGRIDLLKDWHARYVETLRGKGKRVRVVEYPDAFHGFYAFPELADSSKLVEDIKLFVDDHRSGSRLDACG

SEQ ID NO: 612 - protein, 356 aa, Zea mays
MGSSSSKNPSHMSSLPWMVRIQAAAFQVAQRRDGSIWRPLLFLGDLKTAASRATPSPDTSEVRSTDITIDVSRGLWARVFCPTAIADDAPAPLPVFVYFHGGGFMLFSASFGPYDTFCRRLCRKLRAVVVSVNYRLAPEHRFPAAYDDGVATLRYLDETPTPLLADIVPAPVDLASCFLIGDSSGGNMVHHVAQRWASMSSATSLQPPLRIRRLRLAGAVLIQPFFGGEERTEAEVRLDKACRILSVARADRYWREFLPEGASRDHPAARVCGEGVELADTFPPAMVVTGGIDLLKDWHARYVETLRGKGKLVRVVDYPDAFHGFYVFPELADSGKLIEDIKLFVDDHRTKASGSD

SEQ ID NO: 613 - protein, 275 aa, Zea mays
MEAGAGGGEPSTPRSRTLPCKVRLQLFCLEVVAGGLSVSRDGTINRSIFNLFDLRARACSGRRRRRPRRRSPSWCTSPAAPSRCSPRPRTSMTPCAAGSAASWAPSSCPSTTASPPNTATPPRTRTASTCSDTSPPRASPTASTTSRWTSPAASSPGTAPAPTSPASWRSVGRRPVSSHHPPRRVLAPSALPAPFWCSRTWAARSGRKRRSGWTGKVPVVTVRGSDWMWRPFLPEGADRNDPVAHVTDENADLADGFPPVMVVTGDRWPRPLQDW

SEQ ID NO: 614 - protein, 334 aa, Zea mays
MSSTTSPASGVSGEAPPPRIVEDCLGLVQLMSDGTVKRAPACLASADDAAPVGCKDVVYDEARNLSLRMYVPSSSRAGNGGAEKLPVLVYFHGGGFIVGSFASPEFHAACARLAAALPAVVLSADYRLAPEHRLPAALQDADALFSWLGAQEQQADPWLADAADLGRVFVSGDSAGANIAHHAAAAPGRRLAGCVLLWPFFGGERRTRSEAACPGDAFLTLPLYDQMWRLALPAGATRDHPAANPEAGELPPLLVAAGDRDMLIDRIREYVARARARAAAAGNRRVDLVEFPGAGHGFAILEPDGEDAGELVRVVRRFVHGGDAAGPPPLSGRG

SEQ ID NO: 615 - protein, 323 aa, Zea mays
MSDGTVKRAPACLASADDAAPVRCKDVVYDEARNLSLRMYVPSSRAGNGGAEKLPVLVYFHGGGFIVGSFASPEFHAACARRGAALPAVVLSADYRLAPEHRLPAALEDADAIFSWLGAQEQQADPWLADAADLGRVFVSGDSAGANIAHHAAAAPGRRLAGCVLLWPFFGGERRTRSEAAYLGDAFLTLPLYDQMWRLALPAGATRDHPAANPEAGELPPLLVAAGDRDMLIDRIREYVARVRAAAAGNRRVDLVEFPGAGHGFAILEPDGEAASELVRVVRQVRAWRGCRRPGAAQRPRMRQGVVGICPDTFLVTLPGAST

SEQ ID NO: 616 - protein, 342 aa, Zea mays
MSSPAAGTAAEPHVVEDCLGFVQLLSDGTVRRSTDYSMLRPIGRVPSDTDLPVQWKDVVYEDTRGLRLRMYRPTGAAAGETKLPVLVYFHGGGFCLLSFEVASFHAGALRLAAELPALVLSADYRLAPEHRLPAALDDAESAFAWLRAQAAPPSAAGAESDPWLAESADFARVFVAGDSAGGNISHHVAVRHASSGGGLSLAPLRLAGCVMLWPYFGGEEPTPSEAAFPADQPMGTALFDQMWRLALPAGATKDHPFANPFAPGSVPLRDLGAAFPPLLVVDPDQDPLHDRVVDYVARLKAAGKAVELVVFAGQGHGFFAMEPCGEAADDLIRVIRRFVYGA

SEQ ID NO: 617 - protein, 343 aa, Zea mays
MSSTTTTSPASGVSGEAPPPRIVEDCLGLVQLMSDGTVKRAPASHVLLPDEEPAPPCLASADDAASVRCKDVVYDEARNLSLRMYVPSSSRAGNGGAEKLPVLVYFHGGGFIVGSFASPEFHAACARLAAALPAVVLSADYRLAPEHRLPAALQDADAIFSWLGAQEQQAAAGGGADPWLADAADLGRVFVSGDSAGANIAHHAAAAPGRRLAGCVLLWPFFGGERRTRSEAACLGDAFLTLPLYDQMWRLALPAGATRDHPAANPEVGELPPLLVAAGDRDMLIDRIREYVARARARAAAAGNRRVDLVEFPGAGHGFAILEPDGEAAGELVRVVRRFVHGG

SEQ ID NO: 618 - protein, 299 aa, Zea mays
MSGSTAPPHVVEDFLGVIQIFSDGSIVRGDESTIMPAGPCPDVPGVQWKDAVYEATRGLKVRVYKPPPTPGGGNQGKLPVLVYFYGGGYCGGAYDHPLFHSCCQRFAAELPAVVLSVQYRLAPEHRLPAAVEDGAAFFSWLRAQAQAQPAAPGAADPWLAESADFSRTFVSGGSAGANLAHHIVVRIASGQIALGAALWRMALPVGAIRDHPLANPFGPGSPSLEPLPLPPALVVAPERDVLHGHVWRYAARLREMGKPVELAEFAGEGHGFSVGPWSEARDELMRILKRFVNQGAALG

SEQ ID NO: 619 - protein, 339 aa, Zea mays
MSGSTAPPHVVEDFLGVIQIFSDGSIVRGDESTIRPSGPCSDVPGVQWKDAVYEATRGLKVRVYKPPPTPGGGNQGKLPVLVYFHGGGYCGGAYDHPLLHSCCQRFAAELPAVVLSVQYRLAPEHRLPAAVEDGAAFFSWLRSQAQAQPAAPGAAAADPWLAESADFSRTFVSGGSAGANLAHHIVVRIASGQIALGAAVRVAGYVLFSAFFGSVERVATESDPPAGVYLTVETIDQLWRMALPVGATRDHPLANPFGPGSPSLEPLPLPPALVVAPERDVLHGHVRRYAARLREMGKPVELAEFAGEGHAFFVGPWSEARDELMRILKRFVNQSAALG

SEQ ID NO: 620 - protein, 339 aa, Zea mays
MSSSSPPPPHVVEDMPHVLQLLSDGTVVRFADYDTLPPPSVPPAPLPVRWKDVVYDATHGLKLRVYSPSPPASCGKLPVLVYFHGGGYVLGTFALPSFHACCLRLAGELPAVVLSADYRLAPEHRLPAALDDAAAVMRWVRAQAVAAGGGDPWLADSADPGRVFVAGDSAGGNIVHHVAVRRLGSAASGELDPVRVAGHVMLCPFFGGAERTASESEFPPGPFLTLPWYDQAWRLALPPGATRDHPFANPFGPESPALLGLRDVALPPTLVVAAGQDLLRDRQADYVARLKAMGQHVEHVEFEGQHHGFFTVEPASDASSELVRLVKRFVYGDGDGNSI

SEQ ID NO: 621 - protein, 351 aa, Zea mays
MPAVSAAACCAATTPANEVAEDLLGFLRVLRDGTVLRSPADPVFCPATFPGSHPSVQWKEAVYDKPKNLRVRVYRPTTPPGTKKKLPVLVHFHGGGFCLGSCTWANVHEFCLRLAAEAGAVVLSAGYRLAPEHRLPAAFDDGAGFMRWLRDQSAIGGAGASDAWLAEAADFGRVLVTGDSAGATIAHHLAVRAGSAAAEPEPEPEPGLLTVRGYVLLMPFFGGVRRTASEAECAEEAFPNLDLVDRFWRLSLPAGATRDHPASNPFGPDSPDLGPVDFRPVLVVAGGLDLIRDRTVDYAERLAAMGKPVELAEFAGMPHGFYLHQPGSQATGELIQTVARFVHVVAPEAAA

SEQ ID NO: 622 - protein, 378 aa, Zea mays
MHVNKGTPAAMPAVLVPGCCPAATAANEVVEDVLGLVRVLGDGTVVRSAVGPVFSPATSFPENHPCVEWKEAVYDKPNNLLVRMYKPSPPAAGGKAPVLVHFHGGGFCIGSCTWANVHAFCLRLAADTGAVVLSAGYRLAPEHRLPVAVDDGAGFMRWLRGQSSSADAADADADAWAWLADAADLGRVFVTGDSAGATIAHHLAVRAGVAAAGAGEAGDGERKTPGQQVTTVRGYVLLLPFFGGVERTPSEKAGCPAGAGALLSLDVLDRFWRVSLPVGATRDHPVANPFGPDSPELGSVDFPPVLVVVAGLDLLRDRAVDYAERLAAAGKPVELAEFAAAAHGFYLHEPGSEATGELIRAVGRFVDSCVSASEVLLD

SEQ ID NO: 623 - protein, 328 aa, Zea mays
MASEAAPRVVVDECRGVLFVYSDGTVVRRAQPGFATPVRDDGTVDWKDVTFDEARGLALRLYLPRDRGAGAGRRLPVFFYYHGGGFCIGSRAWPNCQNYCLRLASDLGALVVAPDYRLAPEHRLPAAIDDGAAAVLWLARQGGGDPWVAEAADLGRVFVSGDSAGGTIAHHLAVRFGGSPADLAPVAVRGYVQLMPFFGGVARTRSEAECPADAFLDRPLNDRYWRLSLPEGATPDHPVANPFGPGAPPLDAVDFAPTLVVVGGRDLLHDRAVDYAARLRAAGKPVVVRDFHGQQHGFFTIDPWSDASAELMRVIKRFVDADGRFDFD

SEQ ID NO: 624 - protein, 331 aa, Zea mays
MSGDTAPHVVEDFFGAIQLLSDGTVVRGDEAALLPPKPFPDVPGVQWKDAVYDAARGLKVRVYRPTADAGDSKLPVLVHFHGGGYCVGSYDELGGADYLRRRLAADLPALVLSVQYRLAPEHRLPAAIEDGATFLAWLRGQAALAGAGGAGAGVEQWLAESADFARTFLSGVSAGANLAHHLAVRAGSGQVDLAPARLAGLVLLSLFLGGVERTATESAPPDGVSLTVAMSDQLWRMALPVGASMDHPLANPFGPGSPGLEPVALPPVLVEAPGVDVLRDRVLLYAARLREMGKDVELAEFPGEQHGFSVLRWGQANEELMQILKRFLHRK

SEQ ID NO: 625 - protein, 340 aa, Zea mays
MSSAPAPRVVEDYRGVIQLLSDGTVVRSDPAVLRPSGEHFPDVPGVQWEDVVYDAAHGLSLRVYRPAAATATAGDAAREEEKKKKLPVLMYFHSGGFCLGTFSQPNFHAGSLRLASELPAVVISADYRLGPEHRLPAAIDDAAAALSWLREQRHPWLAESADFTRVFVAGESSGANMSHHVAVRHGSSGGQLALALAPLRVAGYLLLTPFFGGAVRTAAEEASPPPGAPFTPEMADKMWRLSLPAGATMDHPATNPFGPDSRALGPVAFPRVLVVSAGRDFLHERVLRYAARLREMGKPVEVYVLEGQEHAFFSRQPWSEGTDELIRVVRRFVYTENGVE

SEQ ID NO: 626 - protein, 351 aa, Zea mays
MSSSSPVSAVSSATAPHVVDDCLGIVQLLSDGTVTRSADYSAIPLLGEVPSNLPVQWKDVVYDPAHALRLRMYRPTDTDGGKTTNNKLPVLVYFHGGGFCICSFEMPHFHAGGLRLAAELPALVLSADYRLGPEHRLPAAHRDAEAVLSWLRAQAEADPWLVESADMGRVFVCGDSAGGNIAHHIAVQYGTGHLALGPVVRLGGYIMLWPYFAAEERTASETAGLDVDHQFVSTALLDQMWRLALPVGATRDHPAANPFGPDSVPLEDVAFQPLLVVDPDQDVLHDRTQDYAARLTAMGKLVELVVFRGQGHGFFVFDPCGEASDQLIHVIRRFVLLHKHPCNLVDLSTTM

SEQ ID NO: 627 - protein, 319 aa, Arabidopsis thaliana
MESEIASEFLPFCRIYKDGRVERLIGTDTIPASLDPTYDVVSKDVIYSPENNLSVRLFLPHKSTKLTAGNKLPLLIYIHGGAWIIESPFSPLYHNYLTEVVKSANCLAVSVQYRRAPEDPVPAAYEDVWSAIQWIFAHSNGSGPVDWINKHADFGKVFLGGDSAGGNISHHMAMKAGKEKKLDLKIKGIAVVHPAFWGTDPVDEYDVQDKETRSGIAEIWEKIASPNSVNGTDDPLFNVNGSGSDFSGLGCDKVLVAVAGKDVFVRQGLAYAAKLEKCEWEGTVEVVEEEGEDHVFHLQNPKSDKALKFLKKFVEFIIG

SEQ ID NO: 628 - protein, 344 aa, Arabidopsis thaliana
MATISFSHNHQSSDNRRGGSHHHRHGPVVEEIEGLIKVFNDGCVERPPIVPIVSPTIHPSSKATAFDIKLSNDTWTRVYIPDAAAASPSVTLPLLVYFHGGGFCVGSAAWSCYHDFLTSLAVKARCVIVSVNYRLAPEHRLPAAYDDGVNVVSWLVKQQISTGGGYPSWLSKCNLSNVFLAGDSAGANIAYQVAVRIMASGKYANTLHLKGIILIHPFFGGESRTSSEKQQHHTKSSALTLSASDAYWRLALPRGASRDHPWCNPLMSSAGAKLPTTMVFMAEFDILKERNLEMCKVMRSHGKRVEGIVHGGVGHAFHILDNSSVSRDRIHDMMCRLHNFIHPS

SEQ ID NO: 629 - protein, 347 aa, Artificial Sequence
  AT-DTP4 fusion protein
MGSSHHHHHHSSGLVPRGSHMSEPSPIADPYAYLNIVNNPDGSITRDLSNFPCTAATPDPSPLNPAVSKDLPVNQLKSTWLRLYLPSSAVNEGNVSSQKLPIVVYYHGGGFILCSVDMQLFHDFCSEVARDLNAIVVSPSYRLAPEHRLPAAYDDGVEALDWIKTSDDEWIKSHADFSNVFLMGTSAGGNLAYNVGLRSVDSVSDLSPLQIRGLILHHPFFGGEERSESEIRLMNDQVCPPIVTDVMWDLSLPVGVDRDHEYSNPTVGDGSEKLEKIGRLRWKVMMIGGEDDPMIDLQKDVAKLMKKKGVEVVEHYTGGHVHGAEIRDPSKRKTLFLSIKNFIFSVL

SEQ ID NO: 630 - protein, 408 aa, Artificial Sequence
  Consensus sequence from alignment
  misc_feature (3)..(55): Xaa can be any naturally occurring amino acid
  misc_feature (89)..(89): Xaa can be any naturally occurring amino acid
  misc_feature (91)..(91): Xaa can be any naturally occurring amino acid
  misc_feature (95)..(95): Xaa can be any naturally occurring amino acid
  misc_feature (102)..(102): Xaa can be any naturally occurring amino acid
  misc_feature (116)..(121): Xaa can be any naturally occurring amino acid
  misc_feature (123)..(130): Xaa can be any naturally occurring amino acid
  misc_feature (169)..(169): Xaa can be any naturally occurring amino acid
  misc_feature (201)..(209): Xaa can be any naturally occurring amino acid
  misc_feature (211)..(212): Xaa can be any naturally occurring amino acid
  misc_feature (219)..(219): Xaa can be any naturally occurring amino acid
  misc_feature (222)..(222): Xaa can be any naturally occurring amino acid
  misc_feature (245)..(245): Xaa can be any naturally occurring amino acid
  misc_feature (248)..(250): Xaa can be any naturally occurring amino acid
  misc_feature (280)..(280): Xaa can be any naturally occurring amino acid
  misc_feature (289)..(290): Xaa can be any naturally occurring amino acid
  misc_feature (321)..(322): Xaa can be any naturally occurring amino acid
  misc_feature (333)..(333): Xaa can be any naturally occurring amino acid
  misc_feature (357)..(357): Xaa can be any naturally occurring amino acid
  misc_feature (361)..(361): Xaa can be any naturally occurring amino acid
  misc_feature (365)..(365): Xaa can be any naturally occurring amino acid
  misc_feature (378)..(378): Xaa can be any naturally occurring amino acid
  misc_feature (397)..(408): Xaa can be any naturally occurring amino acid
MSXXXXXXXXXXXXXXXXXXXXXXXXXXXXXXXXXXXXXXXXXXXXXXXXXXXXXSDPYKFLNIVKNPDGSITRRLTNFPTTPATPDPXPXNPVXLSKDIPXNQSKSTWLRLYLPXXXXXXAXXXXXXXXVSSKKLPLIVYFHGGGFILCSAASTPFHDFCSEMARELXAVVVSVEYRLAPEHRLPAAYDDGVEALEWIRXXXXXXXXXSXXDEWLKSXADXSNVFLMGTSAGGNIAYNVGLRSXAEXXXDLSPLKIRGLILHQPFFGGEERTESEIRLXNDQVLPLIXXVTDLMWELALPVGVDRDHEYSNPTVGDGSEXXLEKIGRLGWKXVMVIGGGGDPLVDRQRDVAKLLKXKGVXVVEXFTDGGVHGAEIGXDPSKAKTLFGSIKNFISSXXXXXXXXXXXX
